(19) United States
(12) Patent Application Publication
(10) Pub. No.: US 2010/0323348 A1
(43) Pub. Date: Dec. 23, 2010

(54) Methods and Compositions for Using Error-Detecting and/or Error-Correcting Barcodes in Nucleic Acid Amplification Process

(75) Inventors: Micah L. Hamady, Berkeley, CA (US); Robin D. Knight, Lafayette, CO (US)

Correspondence Address: MEDLEN & CARROLL, LLP, 101 HOWARD STREET, SUITE 350, SAN FRANCISCO, CA, 94105, US

(73) Assignee: The Regents of the University of Colorado, a body corporate, Denver, CO (US)

(21) Appl. No.: 12/693,612

(22) Filed: Jan. 26, 2010

Related U.S. Application Data
(60) Provisional application No. 61/148,931, filed on Jan. 31, 2009.

(51) Int. Cl. C12Q 1/68; C07H 21/00

(52) U.S. Cl. 435/6; 536/24.33

(57) ABSTRACT

The present invention provides methods and compositions for detecting and correcting errors in nucleic acid amplification processes, and methods for using the same. In particular, barcode amplification errors are detected and corrected such that integrity in sample assignment is maintained. The methods are compatible with high throughput sequencing techniques as some of the barcodes are based upon Hamming codes, thereby allowing self-correction for single bit errors. Some methods and compositions of the invention allow characterization (e.g., sequencing) of a plurality of nucleic acid samples simultaneously within a single sequencing reaction.

### STATEMENT REGARDING FEDERALLY FUNDED RESEARCH This invention was made with government support under Grant Nos. T32GM065103 and P01DK078669 awarded by the National Institutes of Health. The government has certain rights in the invention.

### FIELD OF THE INVENTION

[0001] The present invention relates to nucleic acid sequencing. In particular, the invention relates to methods and compositions for detecting errors and correcting such errors during nucleic acid amplification such that accurate sample identification may be maintained. The combination of the methods and compositions described herein allow characterization of a plurality of nucleic acid samples simultaneously when using high throughput amplification and/or sequencing technologies.

### BACKGROUND OF THE INVENTION

[0002] DNA barcodes were first developed as a tool for species-level identifications. Consequently, there is a rapidly growing database of these short sequences from a wide variety of taxa. Correlations have also been drawn between the nucleotide content of the short DNA barcode sequences and the genomes from which they are derived. Consequently, short nucleotide sequences can reliably track information about the composition of the entire genome. Min et al.,. “DNA barcodes provide a quick preview of mitochondrial genome composition” PLoS One 2(3):e325 (2007).

[0003] In the past several years, microarray technologies based on whole genome analysis have been applied to the study of gene expression and/or amplification. Microarrays arose out of the development of large-scale sequencing approaches and generate a far greater volume of data than the data representing the sequences themselves. Ghosh D., “High throughput and global approaches to gene expression” Comb Chem High Throughput Screen 3:411-20 (2000). The current state of development of microarray expression and/or amplification has overshadowed conventional sequencing methods and the associated approaches to manage and analyze the information they generate.

[0004] What is needed in the art is an efficient, low cost method for tracking and identifying specific nucleic acids during polymerase chain reaction amplification that is compatible with conventional high throughput data generation technology.

### SUMMARY OF THE INVENTION

[0005] The present invention relates to nucleic acid sequencing. In particular, the invention relates to methods and compositions for detecting errors and correcting such errors during nucleic acid amplification such that accurate sample identification may be maintained. The combination of the methods and compositions described herein allow characterization of a plurality of nucleic acid samples simultaneously when using high throughput amplification and/or sequencing technologies.

[0006] In one embodiment, the present invention contemplates methods and compositions comprising primers encoding error-correcting sequence tags and/or error-detecting sequence tags (i.e., for example, error-correcting barcodes and/or error-detecting barcodes).

[0007] In one embodiment, the present invention contemplates a pyrosequencing compatible primer comprising a first region containing a unique error-detecting/correcting hamming barcode. In one embodiment, the primer further comprises a second region complementary to a bacterial 16S rRNA gene. In one embodiment, the barcode is attached to the 3′ end of the primer. In one embodiment, the barcode is attached to the 5′ end of the primer. In one embodiment, the barcode is attached to the 3′ end and the 5′ end of the primer.

[0008] In one embodiment, the present invention contemplates a method of assigning sequence data to individual samples from a mixture of samples, comprising: a) providing: i) a pyrosequencing compatible primer comprising a first region containing a unique error-detecting/correcting barcode and a second region complementary to a target nucleic acid molecule and, and ii) a target nucleic acid molecule, b) amplifying said target nucleic acid molecule with said primer, c) pooling a plurality of said amplification product, and d) pyrosequencing said pooled amplification products to determine their respective nucleotide sequences. In one embodiment, the plurality of amplification products are pooled in equimolar ratios. In one embodiment, the unique error-detecting/correcting barcode is a Hamming code. In one embodiment, the target nucleic acid molecule comprises a portion of the 16S rRNA gene. In one embodiment, the barcode is attached to the 3′ end of the primer. In one embodiment, the barcode is attached to the 5′ end of the primer. In one embodiment, the barcode is attached to the 3′ end and the 5′ end of the primer. In one embodiment, the method further comprises identifying amplification products with unique barcode sequence errors. In one embodiment, the compositions are used in parallel sequencing runs, wherein a plurality of sequencing assays are performed simultaneously. In one embodiment, the sequencing assay comprises pyrosequencing wherein nucleic acid sequences from many samples may be characterized simultaneously in a nucleic acid amplification process. In one embodiment, the method further comprising correcting the unique barcode sequence of amplification products containing correctable unique barcode sequence errors. In one embodiment, the method further comprises discarding the nucleotide sequence of amplification products containing non-correctable unique barcode sequence errors. In one embodiment, the method further comprises aligning the nucleotide sequences of said amplification products to generate a phylogenetic tree.

[0009] In one embodiment, the present invention contemplates a method comprising: a) providing: i) a plurality of samples comprising nucleic acid sequences; i) a plurality of primers error correcting and/or error-detecting sequence tags (i.e., for example, ‘barcodes’), wherein said primers are at least partially complementary to said nucleic acid sequences: ii) a parallel sequencing technique (i.e., for example, pyrosequencing) capable of simultaneously characterizing said nucleic acid sequences from said plurality of samples; b) amplifying said plurality of nucleic acid samples using said plurality of primers; and c) analyzing said sequence tags of said amplified nucleic acids. In one embodiment, the sequence tag identifies a sample assignment thereby identifying one of said samples from which said nucleic acid was derived. In one embodiment, the sequence tag identifies the presence of an error in said nucleic acid, thereby establishing a probability that said sample assignment is incorrect. In one embodiment, the sequence tag identifies the absence of any error in said nucleic acid, thereby establishing a probability that said sample assignment is correct.

### DEFINITIONS

[0010] The term “parity bit” as used herein, refers to any bit that is added to a bit-coded string (i.e., for example, a series of “ones” and zeros”) to ensure that the number of bits with the value one in a set of bits is even or odd. Parity bits are used as the simplest form of error detecting code. For example, two variants of parity bits may include, but are not limited to, an even parity bit and an odd parity bit. When using even parity, the parity bit is set to 1 if the number of ones in a given set of bits (not including the parity bit) is odd, making the entire set of bits (including the parity bit) even. When using odd parity, the parity bit is set to 1 if the number of ones in a given set of bits (not including the parity bit) is even, making the entire set of bits (including the parity bit) odd. In other words, an even parity bit will be set to “1” if the number of 1's+1 is even, and an odd parity bit will be set to “1” if the number of 1's+1 is odd.

[0011] The term “parallel sequencing technique” as used herein, refers to any method capable of sequencing multiple templates at one time (i.e., for example, simultaneously). Usually, such techniques are performed by immobilizing either a template or primer on a solid support (i.e., for example, a microarray) configured to support a high throughput process. Pyrosequencing is compatible with most parallel, or massively parallel, sequencing technologies. Fuller C. W., “Rapid parallel nucleic acid analysis” U.S. Pat. No. 7,264,934 (herein incorporated by reference).

[0012] The term “pyrosequencing” as used herein, refers to any pyrophosphate-based nucleic acid sequencing method. Hyman U.S. Pat. No. 4,971,903 (herein incorporated by reference). This technique is based on the observation that pyrophosphate (PPi) is released upon incorporation of the next correct nucleotide 3′ of the primer sequence. For example, when only one of the four nucleotides (i.e., for example, A, T, G, C) is introduced into the reaction at a time, PPi is generated only when the correct nucleotide is introduced. Thus, the production of PPi reveals the identity of the next correct base. Using this process in an iterative fashion results in the identification of the template nucleotide sequence. Pyrosequencing is compatible with most high throughput sequencing techniques, such as using template carrying microbeads deposited in microfabricated picoliter-sized reaction wells. Margulies et al., Nature E-Pub 31 Jul. 2005.

[0013] The term “simultaneously” as used herein refers to any two or more processes that are occurring more or less at the same time. It is not intended that each process begin and end precisely together, but only that their respective durations overlap.

[0014] The term “pyrosequencing compatible primer” as used herein, refers to any primer, or primer pair, that is capable of supporting nucleic acid amplification using any pyrosequencing technology.

[0015] The term “unique error-detecting/correcting Hamming barcode” or “Hamming sequence tag” as used herein, refers to any nucleic acid barcode having a unique sequence identified by the concepts and algorithms associated with Hamming codes (infra).

[0016] The term “Hamming code” as used herein, refers an arithmetic process that identifies unique binary codes based upon inherent redundancy that are capable of correcting single bit errors. For example, a Hamming code can be matched with a nucleic acid barcode in order to screen for single nucleotide errors occurring during nucleic acid amplification. The identification of a single nucleotide error by using a Hamming code, thereby allows for the correction of the nucleic acid barcode.

[0017] The term “sample assignment” as used herein, refers to any established relationship between the source of a specific nucleotide and an attached barcode. For example, when a unique barcode is cross-referenced with a specific geographic location as to where the nucleotide was obtained, the nucleotide has a sample assignment of that specific geographic location.

[0018] The term “equimolar ratios” as used herein, refers to any mixture comprising at least two components, wherein the concentration of each component is the same.

[0019] The term “amplification products” as used herein, refers to any nucleotide produced by the replication and/or amplification of DNA or RNA. For example, mRNA may be amplified into cDNA by reverse transcriptase. Alternative, a DNA template may undergo amplification of at least one of its strands during a polymerase chain reaction (PCR) thereby producing amplification products whose composition is dependent upon the primer pair.

[0020] The term “unique barcode sequence error” as used herein, refers to any alteration in a barcode nucleic acid sequence occurring during amplification.

[0021] The term “correctable unique barcode sequence error” as used herein, refers to any single bit error occurring in a barcode nucleic acid sequence during amplification.

[0022] The term “uncorrectable unique barcode sequence error” as used herein, refers to any bit error that is greater than an single bit error (i.e., for example, a two bit, three bit, four bit etc) error occurring during amplification.

[0023] The term “discarding” as used herein, refers to any process that does not rely on a barcode nucleic acid sequence comprising an uncorrectable unique barcode sequence error. Such an error results in an improper sample assignment for the coded nucleic acid thereby resulting in a mis-classification.

[0024] The term “phylogenetic tree” as used herein, refers to any diagram or other similar representation showing the evolutionary relationships among various biological species or other entities that are known to have a common ancestor. For example, a phylogenetic tree may comprise nodes with descendants representing the most recent common ancestor of the descendants, and the edge lengths in some trees may correspond to time estimates.

[0025] The term “sample” as used herein is used in its broadest sense and includes environmental and biological samples. Environmental samples include material from the environment such as soil and water. Biological samples may be animal, including, human, fluid (e.g., blood, plasma and serum), solid (e.g., stool), tissue, liquid foods (e.g., milk), and solid foods (e.g., vegetables). For example, a pulmonary sample may be collected by bronchoalveolar lavage (BAL) which comprises fluid and cells derived from lung tissues. A biological sample may comprise a cell, tissue extract, body fluid, chromosomes or extrachromosomal elements isolated from a cell, genomic DNA (in solution or bound to a solid support such as for Southern blot analysis), RNA (in solution or bound to a solid support such as for Northern blot analysis), cDNA (in solution or bound to a solid support) and the like.

[0026] The term “affinity” as used herein, refers to any attractive force between substances or particles that causes them to enter into and remain in chemical combination. For example, an inhibitor compound that has a high affinity for a receptor will provide greater efficacy in preventing the receptor from interacting with its natural ligands, than an inhibitor with a low affinity.

[0027] The term “derived from” as used herein, refers to the source of a compound or sequence. In one respect, a compound or sequence may be derived from an organism or particular species. In another respect, a compound or sequence may be derived from a larger complex or sequence. “Nucleic acid sequence” and “nucleotide sequence” as used herein refer to an oligonucleotide or polynucleotide, and fragments or portions thereof, and to DNA or RNA of genomic or synthetic origin which may be single- or double-stranded, and represent the sense or antisense strand.

[0028] The term “an isolated nucleic acid”, as used herein, refers to any nucleic acid molecule that has been removed from its natural state (e.g., removed from a cell and is, in a preferred embodiment, free of other genomic nucleic acid).

[0029] The terms “amino acid sequence” and “polypeptide sequence” as used herein, are interchangeable and to refer to a sequence of amino acids.

[0030] As used herein the term “portion” or “region” when in reference to a protein (as in “a portion or region of a given protein”) refers to fragments of that protein. The fragments may range in size from four amino acid residues to the entire amino acid sequence minus one amino acid.

[0031] The term “portion” or “region” when used in reference to a nucleotide sequence refers to fragments of that nucleotide sequence. The fragments may range in size from 5 nucleotide residues to the entire nucleotide sequence minus one nucleic acid residue.

[0032] The term “functionally equivalent codon”, as used herein, refers to different codons that encode the same amino acid. This phenomenon is often referred to as “degeneracy” of the genetic code. For example, six different codons encode the amino acid arginine.

[0033] A “variant” of a protein is defined as an amino acid sequence which differs by one or more amino acids from a polypeptide sequence or any homolog of the polypeptide sequence. The variant may have “conservative” changes, wherein a substituted amino acid has similar structural or chemical properties, e.g., replacement of leucine with isoleucine. More rarely, a variant may have “nonconservative” changes, e.g., replacement of a glycine with a tryptophan. Similar minor variations may also include amino acid deletions or insertions (i.e., additions), or both. Guidance in determining which and how many amino acid residues may be substituted, inserted or deleted without abolishing biological or immunological activity may be found using computer programs including, but not limited to, DNAStar® software.

[0034] A “variant” of a nucleotide is defined as a novel nucleotide sequence which differs from a reference oligonucleotide by having deletions, insertions and substitutions. These may be detected using a variety of methods (e.g., sequencing, hybridization assays etc.).

[0035] A “deletion” is defined as a change in either nucleotide or amino acid sequence in which one or more nucleotides or amino acid residues, respectively, are absent.

[0036] An “insertion” or “addition” is that change in a nucleotide or amino acid sequence which has resulted in the addition of one or more nucleotides or amino acid residues.

[0037] A “substitution” results from the replacement of one or more nucleotides or amino acids by different nucleotides or amino acids, respectively.

[0038] The term “derivative” as used herein, refers to any chemical modification of a nucleic acid or an amino acid. Illustrative of such modifications would be replacement of hydrogen by an alkyl, acyl, or amino group. For example, a nucleic acid derivative would encode a polypeptide which retains essential biological characteristics.

[0039] As used herein, the terms “complementary” or “complementarity” are used in reference to “polynucleotides” and “oligonucleotides” (which are interchangeable terms that refer to a sequence of nucleotides) related by the base-pairing rules. For example, the sequence “C-A-G-T,” is complementary to the sequence “G-T-C-A.” Complementarity can be “partial” or “total.” “Partial” complementarity is where one or more nucleic acid bases is not matched according to the base pairing rules. “Total” or “complete” complementarity between nucleic acids is where each and every nucleic acid base is matched with another base under the base pairing rules. The degree of complementarity between nucleic acid strands has significant effects on the efficiency and strength of hybridization between nucleic acid strands. This is of particular importance in amplification reactions, as well as detection methods which depend upon binding between nucleic acids.

[0040] The terms “homology” and “homologous” as used herein in reference to nucleotide sequences refer to a degree of complementarity with other nucleotide sequences. There may be partial homology or complete homology (i.e., identity). A nucleotide sequence which is partially complementary, i.e., “substantially homologous,” to a nucleic acid sequence is one that at least partially inhibits a completely complementary sequence from hybridizing to a target nucleic acid sequence. The inhibition of hybridization of the completely complementary sequence to the target sequence may be examined using a hybridization assay (Southern or Northern blot, solution hybridization and the like) under conditions of low stringency. A substantially homologous sequence or probe will compete for and inhibit the binding (i.e., the hybridization) of a completely homologous sequence to a target sequence under conditions of low stringency. This is not to say that conditions of low stringency are such that non-specific binding is permitted; low stringency conditions require that the binding of two sequences to one another be a specific (i.e., selective) interaction. The absence of non-specific binding may be tested by the use of a second target sequence which lacks even a partial degree of complementarity (e.g., less than about 30% identity); in the absence of non-specific binding the probe will not hybridize to the second non-complementary target.

[0041] The terms “homology” and “homologous” as used herein in reference to amino acid sequences refer to the degree of identity of the primary structure between two amino acid sequences. Such a degree of identity may be directed a portion of each amino acid sequence, or to the entire length of the amino acid sequence. Two or more amino acid sequences that are “substantially homologous” may have at least 50% identity, preferably at least 75% identity, more preferably at least 85% identity, most preferably at least 95%, or 100% identity.

[0042] An oligonucleotide sequence which is a “homolog” is defined herein as an oligonucleotide sequence which exhibits greater than or equal to 50% identity to a sequence, when sequences having a length of 100 bp or larger are compared.

[0043] Low stringency conditions comprise conditions equivalent to binding or hybridization at 42° C. in a solution consisting of 5×SSPE (43.8 g/l NaCl, 6.9 g/l NaH₂PO₄.H₂O and 1.85 g/l EDTA, pH adjusted to 7.4 with NaOH), 0.1% SDS, 5×Denhardt's reagent {50×Denhardt's contains per 500 ml: 5 g Ficoll (Type 400, Pharmacia), 5 g BSA (Fraction V; Sigma)} and 100 μg/ml denatured salmon sperm DNA followed by washing in a solution comprising 5×SSPE, 0.1% SDS at 42° C. when a probe of about 500 nucleotides in length. is employed. Numerous equivalent conditions may also be employed to comprise low stringency conditions; factors such as the length and nature (DNA, RNA, base composition) of the probe and nature of the target (DNA, RNA, base composition, present in solution or immobilized, etc.) and the concentration of the salts and other components (e.g., the presence or absence of formamide, dextran sulfate, polyethylene glycol), as well as components of the hybridization solution may be varied to generate conditions of low stringency hybridization different from, but equivalent to, the above listed conditions. In addition, conditions which promote hybridization under conditions of high stringency (e.g., increasing the temperature of the hybridization and/or wash steps, the use of formamide in the hybridization solution, etc.) may also be used.

[0044] As used herein, the term “hybridization” is used in reference to the pairing of complementary nucleic acids using any process by which a strand of nucleic acid joins with a complementary strand through base pairing to form a hybridization complex. Hybridization and the strength of hybridization (i.e., the strength of the association between the nucleic acids) is impacted by such factors as the degree of complementarity between the nucleic acids, stringency of the conditions involved, the Tₘ of the formed hybrid, and the G:C ratio within the nucleic acids.

[0045] As used herein the term “hybridization complex” refers to a complex formed between two nucleic acid sequences by virtue of the formation of hydrogen bounds between complementary G and C bases and between complementary A and T bases; these hydrogen bonds may be further stabilized by base stacking interactions. The two complementary nucleic acid sequences hydrogen bond in an antiparallel configuration. A hybridization complex may be formed in solution (e.g., C₀ t or R₀ t analysis) or between one nucleic acid sequence present in solution and another nucleic acid sequence immobilized to a solid support (e.g., a nylon membrane or a nitrocellulose filter as employed in Southern and Northern blotting, dot blotting or a glass slide as employed in in situ hybridization, including FISH (fluorescent in situ hybridization)).

[0046] As used herein, the term “Tₘ” is used in reference to the “melting temperature.” The melting temperature is the temperature at which a population of double-stranded nucleic acid molecules becomes half dissociated into single strands. As indicated by standard references, a simple estimate of the Tₘ value may be calculated by the equation: Tₘ=81.5+0.41 (% G+C), when a nucleic acid is in aqueous solution at 1M NaCl. Anderson et al., “Quantitative Filter Hybridization” In: Nucleic Acid Hybridization (1985). More sophisticated computations take structural, as well as sequence characteristics, into account for the calculation of Tₘ.

[0047] As used herein, the term “stringency” is used in reference to the conditions of temperature, ionic strength, and the presence of other compounds such as organic solvents, under which nucleic acid hybridizations are conducted. “Stringency” typically occurs in a range from about Tₘ to about 20° C. to 25° C. below Tₘ. A “stringent hybridization” can be used to identify or detect identical polynucleotide sequences or to identify or detect similar or related polynucleotide sequences. For example, when fragments are employed in hybridization reactions under stringent conditions the hybridization of fragments which contain unique sequences (i.e., regions which are either non-homologous to or which contain less than about 50% homology or complementarity are favored. Alternatively, when conditions of “weak” or “low” stringency are used hybridization may occur with nucleic acids that are derived from organisms that are genetically diverse (i.e., for example, the frequency of complementary sequences is usually low between such organisms).

[0048] As used herein, the term “amplifiable nucleic acid” is used in reference to nucleic acids which may be amplified by any amplification method. It is contemplated that “amplifiable nucleic acid” will usually comprise “sample template.”

[0049] As used herein, the term “sample template” refers to nucleic acid originating from a sample which is analyzed for the presence of a target sequence of interest. In contrast, “background template” is used in reference to nucleic acid other than sample template which may or may not be present in a sample. Background template is most often inadvertent. It may be the result of carryover, or it may be due to the presence of nucleic acid contaminants sought to be purified away from the sample. For example, nucleic acids from organisms other than those to be detected may be present as background in a test sample.

[0050] “Amplification” is defined as the production of additional copies of a nucleic acid sequence and is generally carried out using polymerase chain reaction. Dieffenbach C. W. and G. S. Dveksler (1995) In: PCR Primer, a Laboratory Manual, Cold Spring Harbor Press, Plainview, N.Y.

[0051] As used herein, the term “polymerase chain reaction” (“PCR”) refers to the method of K. B. Mullis U.S. Pat. Nos. 4,683,195 and 4,683,202, herein incorporated by reference, which describe a method for increasing the concentration of a segment of a target sequence in a mixture of genomic DNA without cloning or purification. The length of the amplified segment of the desired target sequence is determined by the relative positions of two oligonucleotide primers with respect to each other, and therefore, this length is a controllable parameter. By virtue of the repeating aspect of the process, the method is referred to as the “polymerase chain reaction” (hereinafter “PCR”). Because the desired amplified segments of the target sequence become the predominant sequences (in terms of concentration) in the mixture, they are said to be “PCR amplified”. With PCR, it is possible to amplify a single copy of a specific target sequence in genomic DNA to a level detectable by several different methodologies (e.g., hybridization with a labeled probe; incorporation of biotinylated primers followed by avidin-enzyme conjugate detection; incorporation of ³²P-labeled deoxynucleotide triphosphates, such as dCTP or dATP, into the amplified segment). In addition to genomic DNA, any oligonucleotide sequence can be amplified with the appropriate set of primer molecules. In particular, the amplified segments created by the PCR process itself are, themselves, efficient templates for subsequent PCR amplifications.

[0052] As used herein, the term “primer” refers to an oligonucleotide, whether occurring naturally as in a purified restriction digest or produced synthetically, which is capable of acting as a point of initiation of synthesis when placed under conditions in which synthesis of a primer extension product which is complementary to a nucleic acid strand is induced, (i.e., in the presence of nucleotides and an inducing agent such as DNA polymerase and at a suitable temperature and pH). The primer is preferably single stranded for maximum efficiency in amplification, but may alternatively be double stranded. If double stranded, the primer is first treated to separate its strands before being used to prepare extension products. Preferably, the primer is an oligodeoxy-ribonucleotide. The primer must be sufficiently long to prime the synthesis of extension products in the presence of the inducing agent. The exact lengths of the primers will depend on many factors, including temperature, source of primer and the use of the method.

[0053] As used herein, the term “probe” refers; to an oligonucleotide (i.e., a sequence of nucleotides), whether occurring naturally as in a purified restriction digest or produced synthetically, recombinantly or by PCR amplification, which is capable of hybridizing to another oligonucleotide of interest. A probe may be single-stranded or double-stranded. Probes are useful in the detection, identification and isolation of particular gene sequences. It is contemplated that any probe used in the present invention will be labeled with any “reporter molecule,” so that is detectable in any detection system, including, but not limited to enzyme (e.g., ELISA, as well as enzyme-based histochemical assays), fluorescent, radioactive, and luminescent systems. It is not intended that the present invention be limited to any particular detection system or label.

[0054] As used herein, the terms “restriction endonucleases” and “restriction enzymes” refer to bacterial enzymes, each of which cut double-stranded DNA at or near a specific nucleotide sequence.

[0055] DNA molecules are said to have “5′ ends” and “3′ ends” because mononucleotides are reacted to make oligonucleotides in a manner such that the 5′ phosphate of one mononucleotide pentose ring is attached to the 3′ oxygen of its neighbor in one direction via a phosphodiester linkage. Therefore, an end of an oligonucleotide is referred to as the “5′ end” if its 5′ phosphate is not linked to the 3′ oxygen of a mononucleotide pentose ring. An end of an oligonucleotide is referred to as the “3′ end” if its 3′ oxygen is not linked to a 5′ phosphate of another mononucleotide pentose ring. As used herein, a nucleic acid sequence, even if internal to a larger oligonucleotide, also may be said to have 5′ and 3′ ends. In either a linear or circular DNA molecule, discrete elements are referred to as being “upstream” or 5′ of the “downstream” or 3′ elements. This terminology reflects the fact that transcription proceeds in a 5′ to 3′ fashion along the DNA strand. The promoter and enhancer elements which direct transcription of a linked gene are generally located 5′ or upstream of the coding region. However, enhancer elements can exert their effect even when located 3′ of the promoter element and the coding region. Transcription termination and polyadenylation signals are located 3′ or downstream of the coding region.

[0056] As used herein, the term “an oligonucleotide having a nucleotide sequence encoding a gene” means a nucleic acid sequence comprising the coding region of a gene, i.e. the nucleic acid sequence which encodes a gene product. The coding region may be present in a cDNA, genomic DNA or RNA form. When present in a DNA form, the oligonucleotide may be single-stranded (i.e., the sense strand) or double-stranded. Suitable control elements such as enhancers/promoters, splice junctions, polyadenylation signals, etc. may be placed in close proximity to the coding region of the gene if needed to permit proper initiation of transcription and/or correct processing of the primary RNA transcript. Alternatively, the coding region utilized in the expression vectors of the present invention may contain endogenous enhancers/promoters, splice junctions, intervening sequences, polyadenylation signals, etc. or a combination of both endogenous and exogenous control elements.

[0057] As used herein, the term “regulatory element” refers to a genetic element which controls some aspect of the expression of nucleic acid sequences. For example, a promoter is a regulatory element which facilitates the initiation of transcription of an operably linked coding region. Other regulatory elements are splicing signals, polyadenylation signals, termination signals, etc.

[0058] Transcriptional control signals in eukaryotes comprise “promoter” and “enhancer” elements. Promoters and enhancers consist of short arrays of DNA sequences that interact specifically with cellular proteins involved in transcription. Maniatis, T. et al., Science 236:1237 (1987). Promoter and enhancer elements have been isolated from a variety of eukaryotic sources including genes in plant, yeast, insect and mammalian cells and viruses (analogous control elements, i.e., promoters, are also found in prokaryotes). The selection of a particular promoter and enhancer depends on what cell type is to be used to express the protein of interest.

[0059] The presence of “splicing signals” on an expression vector often results in higher levels of expression of the recombinant transcript. Splicing signals mediate the removal of introns from the primary RNA transcript and consist of a splice donor and acceptor site. Sambrook, J. et al., In: Molecular Cloning: A Laboratory Manual, 2nd ed., Cold Spring Harbor laboratory Press, New York (1989) pp. 16.7-16.8. A commonly used splice donor and acceptor site is the splice junction from the 16S RNA of SV40.

[0060] The term “poly A site” or “poly A sequence” as used herein denotes a DNA sequence which directs both the termination and polyadenylation of the nascent RNA transcript. Efficient polyadenylation of the recombinant transcript is desirable as transcripts lacking a poly A tail are unstable and are rapidly degraded. The poly A signal utilized in an expression vector may be “heterologous” or “endogenous.” An endogenous poly A signal is one that is found naturally at the 3′ end of the coding region of a given gene in the genome. A heterologous poly A signal is one which is isolated from one gene and placed 3′ of another gene. Efficient expression of recombinant DNA sequences in eukaryotic cells involves expression of signals directing the efficient termination and polyadenylation of the resulting transcript. Transcription termination signals are generally found downstream of the polyadenylation signal and are a few hundred nucleotides in length.

[0061] The term “transfection” or “transfected” refers to the introduction of foreign DNA into a cell.

[0062] As used herein, the terms “nucleic acid molecule encoding”, “DNA sequence encoding,” and “DNA encoding” refer to the order or sequence of deoxyribonucleotides along a strand of deoxyribonucleic acid. The order of these deoxyribonucleotides determines the order of amino acids along the polypeptide (protein) chain. The DNA sequence thus codes for the amino acid sequence.

[0063] The term “Southern blot” refers to the analysis of DNA on agarose or acrylamide gels to fractionate the DNA according to size, followed by transfer and immobilization of the DNA from the gel to a solid support, such as nitrocellulose or a nylon membrane. The immobilized DNA is then probed with a labeled oligodeoxyribonucleotide probe or DNA probe to detect DNA species complementary to the probe used. The DNA may be cleaved with restriction enzymes prior to electrophoresis. Following electrophoresis, the DNA may be partially depurinated and denatured prior to or during transfer to the solid support. Southern blots are a standard tool of molecular biologists. J. Sambrook et al. (1989) In: Molecular Cloning: A Laboratory Manual, Cold Spring Harbor Press, NY, pp 9.31-9.58.

[0064] The term “Northern blot” as used herein refers to the analysis of RNA by electrophoresis of RNA on agarose gels to fractionate the RNA according to size followed by transfer of the RNA from the gel to a solid support, such as nitrocellulose or a nylon membrane. The immobilized RNA is then probed with a labeled oligodeoxyribonucleotide probe or DNA probe to detect RNA species complementary to the probe used. Northern blots are a standard tool of molecular biologists. J. Sambrook, J. et al. (1989) supra, pp 7.39-7.52.

[0065] The term “reverse Northern blot” as used herein refers to the analysis of DNA by electrophoresis of DNA on agarose gels to fractionate the DNA on the basis of size followed by transfer of the fractionated DNA from the gel to a solid support, such as nitrocellulose or a nylon membrane. The immobilized DNA is then probed with a labeled oligoribonuclotide probe or RNA probe to detect DNA species complementary to the ribo probe used.

[0066] As used herein the term “coding region” when used in reference to a structural gene refers to the nucleotide sequences which encode the amino acids found in the nascent polypeptide as a result of translation of a mRNA molecule. The coding region is bounded, in eukaryotes, on the 5′ side by the nucleotide triplet “ATG” which encodes the initiator methionine and on the 3′ side by one of the three triplets which specify stop codons (i.e., TAA, TAG, TGA).

[0067] As used herein, the term “structural gene” refers to a DNA sequence coding for RNA or a protein. In contrast, “regulatory genes” are structural genes which encode products which control the expression of other genes (e.g., transcription factors).

[0068] As used herein, the term “gene” means the deoxyribonucleotide sequences comprising the coding region of a structural gene and including sequences located adjacent to the coding region on both the 5′ and 3′ ends for a distance of about 1 kb on either end such that the gene corresponds to the length of the full-length mRNA. The sequences which are located 5′ of the coding region and which are present on the mRNA are referred to as 5′ non-translated sequences. The sequences which are located 3′ or downstream of the coding region and which are present on the mRNA are referred to as 3′ non-translated sequences. The term “gene” encompasses both cDNA and genomic forms of a gene. A genomic form or clone of a gene contains the coding region interrupted with non-coding sequences termed “introns” or “intervening regions” or “intervening sequences.” Introns are segments of a gene which are transcribed into heterogeneous nuclear RNA (hnRNA); introns may contain regulatory elements such as enhancers. Introns are removed or “spliced out” from the nuclear or primary transcript; introns therefore are absent in the messenger RNA (mRNA) transcript. The mRNA functions during translation to specify the sequence or order of amino acids in a nascent polypeptide.

[0069] In addition to containing introns, genomic forms of a gene may also include sequences located on both the 5′ and 3′ end of the sequences which are present on the RNA transcript. These sequences are referred to as “flanking” sequences or regions (these flanking sequences are located 5′ or 3′ to the non-translated sequences present on the mRNA transcript). The 5′ flanking region may contain regulatory sequences such as promoters and enhancers which control or influence the transcription of the gene. The 3′ flanking region may contain sequences which direct the termination of transcription, posttranscriptional cleavage and polyadenylation.

[0070] The term “label” or “detectable label” are used herein, to refer to any composition detectable by spectroscopic, photochemical, biochemical, immunochemical, electrical, optical or chemical means. Such labels include biotin for staining with labeled streptavidin conjugate, magnetic beads (e.g., Dynabeads®), fluorescent dyes (e.g., fluorescein, texas red, rhodamine, green fluorescent protein, and the like), radiolabels (e.g., ³H, ¹²⁵I, ³⁵ S, ¹⁴C, or ³²P), enzymes (e.g., horse radish peroxidase, alkaline phosphatase and others commonly used in an ELISA), and calorimetric labels such as colloidal gold or colored glass or plastic (e.g., polystyrene, polypropylene, latex, etc.) beads. Patents teaching the use of such labels include, but are not limited to, U.S. Pat. Nos. 3,817,837; 3,850,752; 3,939,350; 3,996,345; 4,277,437; 4,275,149; and 4,366,241 (all herein incorporated by reference). The labels contemplated in the present invention may be detected by many methods. For example, radiolabels may be detected using photographic film or scintillation counters, fluorescent markers may be detected using a photodetector to detect emitted light. Enzymatic labels are typically detected by providing the enzyme with a substrate and detecting, the reaction product produced by the action of the enzyme on the substrate, and calorimetric labels are detected by simply visualizing the colored label.

[0071] The term “binding” as used herein, refers to any interaction between an infection control composition and a surface. Such as surface is defined as a “binding surface”. Binding may be reversible or irreversible. Such binding may be, but is not limited to, non-covalent binding, covalent bonding, ionic bonding, Van de Waal forces or friction, and the like. An infection control composition is bound to a surface if it is impregnated, incorporated, coated, in suspension with, in solution with, mixed with, etc.

### BRIEF DESCRIPTION OF THE DRAWINGS

[0072] The file of this patent contains at least one drawing executed in color. Copies of this patent with color drawings will be provided by the Patent and Trademark Office upon request and payment of the necessary fee.

[0073] FIG. 1 presents one embodiment of the concept of creating Hamming barcodes

[0074] FIG. 1A: Two representative Hamming hyperspheres (blue: center coordinates=(0, 0, 0); red: center coordinates=(1, 1, 1)).

[0075] FIG. 1B: Codeword regions comprising a length of 16 (or longer) checked by parity bits at positions 0, 1, 2, and 4: bits that are checked by each position are marked with 1.

[0076] FIG. 1C: Decoding a “received” codeword containing the binary value of 3 (0011) (n=7, k=4): Case 1: No errors. Case 2: Single-bit error at position 6 that is detected and corrected.

[0077] FIG. 2 presents exemplary data showing UniFrac clustering of samples from a cystic fibrosis lung, a Guerrero Negro microbial mat, air, and North American rivers obtained by pyrosequencing with barcodes.

[0078] FIG. 3 shows taxonomic distributions of bacteria in each of the major sample types in FIG. 2.

### DETAILED DESCRIPTION OF THE INVENTION

[0079] The present invention relates to nucleic acid sequencing. In particular, the invention relates to methods and compositions for detecting errors and correcting such errors during nucleic acid amplification (i.e., for example, a nucleic acid barcode) such that accurate sample identification may be maintained. The combination of the methods and compositions described herein allow characterization of a plurality of nucleic acid samples simultaneously when using high throughput amplification and/or sequencing technologies.

[0080] In one embodiment, the present invention contemplates a composition comprising a tagged (i.e., for example, a Hamming barcode) nucleotide sequence, wherein the nucleotide averages between approximately 270 nucleotides and 1500 nucleotides. In one embodiment, the nucleotide sequence is derived from the 16S rRNA gene. Other embodiments provide a tagged nucleotide sequence wherein the tag is attached to the 3′ or 5′ end of the nucleotide sequence. Alternatively, some embodiments of the present invention contemplate a tagged nucleotide sequence wherein the tag is attached to both the 3′ and 5′ ends of the nucleotide sequence. Although it is not necessary to understand the mechanism of an invention, it is believed that single end tags may be advantageous for sequencing because variation in the length of variable regions in different species may preclude the second tag from being read.

[0081] In one embodiment, the present invention contemplates a method comprising: a) amplifying a nucleic acid sample using a primer comprising a barcode; and b) using the barcodes to provide sample assignments to a sample from which the nucleic acid was obtained. Although it is not necessary to understand the mechanism of an invention, it is believed that such sample assignments can be done with high confidence because of the unique error-detecting/correcting barcodes that correct amplification mistakes in each respective sample, thereby maintaining the integrity of the sample assignment information.

### I. Conventional Error-Correcting Coding

[0082] The use of error-correction codes has been implemented in many different fields of art. For example, not only in biotechnology, but in information media such as cell phones and/or compact disks. R H Morelos-Zaragoza, The Art of Error-Correcting Coding. (John Wiley & Sons, Hoboken, N.J., (2006). As discussed below, these conventional techniques did not recognize, or employ, the advantages of Hamming barcodes (infra).

[0083] A. Cell Culture Assays

[0084] Quantitative and highly parallel methods for analyzing deletion mutants using barcodes in Saccharomyces cerevisiae have been reported. Shoemaker et al., “Quantitative Phenotypic Analysis of Yeast Deletion Mutants Using a Highly Parallel Molecular Bar-Coding Strategy” Nature Genetics 14(4): 450-456 (1996). This approach uses a PCR targeting strategy to generate large numbers of deletion strains that are individually labeled with a unique 20-base tag sequence that can be detected by hybridization to a high-density oligonucleotide array. The tags serve as unique identifiers (molecular barcodes) that allow analysis of large numbers of deletion strains simultaneously through selective growth conditions.

[0085] B. Vector Analysis Assays

[0086] Methods for identifying an mRNA source pool from which individual cDNAs were derived have been tried by adding unique 6-nucleotide “bar codes” to the 3′-end of each mRNA during first-strand cDNA synthesis. Qiu et al., “DNA Sequence-Based “Bar Codes” for Tracking the Origins of Expressed Sequence Tags From a Maize Library Constructed Using Multiple mRNA Sources” Plant Physiology 133: 475-481 (2003). This method utilized an error-correcting decoding algorithm that identified a source mRNA pool for more than 97% of the expressed sequence tags (ESTs) examined. Of the 3,684 sequences examined with this decoding algorithm, 3,531 (95.8%) had exact bar code matches, 70 (1.9%) had errors in their bar codes that were decodable, and 83 (2.3%) were not decodable.

[0087] This prior method relies upon a natural metric for designing DNA bar codes known as an “edit metric” where the minimal distance between two strands of bar code DNA sequences is a single base insertion, deletion, or substitution required to transform one strand into the other. (Gusfield, 1997). This method produces a higher rate of uncorrectable errors than other barcoded libraries, thus requiring bar codes that allow for the correction of two errors (i.e., for example, being at least five edits apart). To address this problem, it is pointed out that lengthening the bar codes by just 2 by (to 8 bp) would provide 34 unique bar codes (Ashlock et al., 2002). Unlike the present invention, these bar codes are located within an EST sequence by identifying the vector and poly(T) sequences and then determining whether the bases at the approximate location of the bar code match any of the bar codes used in the construction of the library.

[0088] C. Pyrosequencing Assays

[0089] Methods of labeling and amplifying nucleic acid molecules with primers comprising unique five-nucleotide barcodes have been identified following amplification by methods that include pyrosequencing. Ronaghi et al. “Methods and Compositions for Clonal Amplification of Nucleic Acid” United States Patent Application Number 2006/008,824 (herein incorporated by reference). The described barcoded primers are attached to a solid surface (i.e., for example, a bead) such that specific nucleic acid targets may be isolated/immobilized prior to amplification with other (non-barcoded) primers. While the resulting PCR product(s) include the unique barcode sequence the barcoded PCR primer(s) are not amplified.

[0090] DNA bar codes and pyro sequencing have been used to detect minor drug resistance mutations in multidrug-resistant HIV populations. Each primer consisted of the conventional 454 A and 454 B sequences at the 5′ ends and the HIV-complementary regions at the 3′ end separated by a 4-nucleotide DNA bar code sequence. The results identified a variety of minor drug resistance alleles in patient samples and demonstrated the feasibility of using pyrosequencing for efficient HIV genotyping. Several controls were included in these experiments to allow estimations of the background error rate associated with pyrosequencing. Hoffmann et al., “DNA Barcoding and Pyrosequencing to Identify Rare HIV Drug Resistance Mutations” Nucleic Acids Research 35(13): e91 (2007).

[0091] Pyrosequencing-tailored barcoding approaches have been reported that utilize 48 reverse-forward barcode pairs that are separated by a cloning linker, and are unique with respect to at least 4 nucleotide positions. Such a configuration was believed to provide uniquely barcoded libraries from up to 48 different samples. The barcoded primers were each 45-46 nucleotides long and consisted of: i) a forward or reverse 454 sequencing primer, ii) a forward or reverse barcode and iii) a forward or reverse cloning-linker. Lengthening the barcodes and/or increasing the variation(s) in the fixed forward and reverse linkers may expand the multiplexing capacity of this approach. Parameswaran et al., “A Pyrosequencing-Tailored Nucleotide Barcode Design Unveils Opportunities For Large-Scale Sample Multiplexing” Nucleic Acids Research 35(19): e130 (2007).

[0092] Conventional PCR with 5′-nucleotide tagged primers can generate homologous DNA amplification products from multiple specimens that are then subjected to pyrosequencing. Each DNA sequence is subsequently traced back to its individual source through 5′tag-analysis. This approach enables the assignment of virtually all the generated DNA sequences to the correct source once sequencing anomalies are accounted for. Binladen et al., “The Use of Coded PCR Primers Enables High-Throughput Sequencing of Multiple Homolog Amplification Products By 454 Parallel Sequencing” PloS ONE 2: e197 (2007). Conventional primers specific for 16S mammalian mitochondrial DNA (mtDNA) were modified into sixteen unique forward, and sixteen reverse primers through the addition of 5′-dinucleotide tags. The results indicated a bias in the distribution of the differently tagged primers that is dependent on the 5′ nucleotide of the tag. Specifically, primers 5′-labeled with a cytosine were heavily overrepresented among the final sequences, while those 5′-labeled with a thymine were strongly underrepresented. A weaker bias was also reported for the distribution of sequences sorted by the second nucleotide of the dinucleotide tags. In comparison to the dinucleotide tags, the performance of tetranucleotide tagged primers was less efficient than predicted. Although the small number of tetranucleotide tagged primers tested renders statistically supported comparisons difficult, data indicate that overall the rate of sequence miss-assignment for these primers was lower than for the dinucleotide tags.

[0093] Characterization of 141,000 sequences of 16S rRNA genes obtained from 100 uncultured gastrointestinal bacterial samples from rhesus macaques was performed using primers marked with a “unique DNA bar code”. These bar codes were represented by distinctive 4 base sequences between the 16S rRNA gene complementarity region and the pyrosequencing primer binding site. McKenna et al., “The Macaque Gut Microbiome In Health, Lentiviral Infection, and Chronic Enterocolitis” PloS Pathog. 4(2): e20 (2008). The resulting error rate for the barcoding procedure was estimated by cataloging all those sequences reads with bar codes that were not among those used for labeling. The analysis indicated that only 0.01% of sequences were likely to be miscataloged due to errors parsing the bar codes.

[0094] Integration site populations have been characterized from gene transfer studies using DNA barcoding and pyrosequencing. To sequence all the samples in a single sequencing experiment, primers that contain unique 4-bp barcodes were used in the second PCR step. The PCR products were gel purified and pooled prior to pyrosequencing. Wang et al., “DNA Barcoding and Pyrosequencing to Analyze Adverse Events In Therapeutic Gene Transfer” Nucleic Acids Research 36(9): e49 (2008).

[0095] 454-pyrosequencing based methods have been reported for monitoring microbial communities in which the hyper-variable region of the 16S rRNA gene is amplified using primers that target adjacent conserved regions followed by direct sequencing of individual PCR products. Andersson et al., “Comparative Analysis of Human Gut Microbiota by Barcoded Pyrosequencing, PloS ONE 3(7): e2836 (2008). Including a sample-specific four nucleotide barcode sequence on one of the primers allows multiple samples to be analyzed in parallel on a single 454-pyrosequencing plate. It was suggested that the recognized pyrosequencing error rate might potentially disturb taxonomic classifications but offered not suggestions for using error correcting and/or detecting Hamming barcodes.

[0096] Methods that couple multiplex PCR with sample-specific DNA barcodes and “next-generation sequencing” (i.e., for example, pyrosequencing) have been reported to enable mutation discovery in candidate genes for multiple samples in parallel. The final amplification step of this method relies on universal PCR primers tailed with 454 Life Sciences A or B at the 5′ end, followed by a sample-specific DNA sequence and 454 sequencing primers such that the first few bases indicate from which sample each read originated. Varley et al., “Nested Patch PCR Enables Highly Multiplexed Mutation Discovery In Candidate Genes” Genome Res. 18:1844-1850 (2008). While the method was admittedly error-prone due to the nature of 454 sequencing, there was no suggestions to use error-correcting and/or detecting Hamming barcodes.

### II. Calculation Of Hamming Code Resolution

[0097] One class of error-correcting codes that use redundancy and standard linear algebra techniques has been referred to as a Hamming code. Hamming R. W., Bell System Technical Journal 29:147 (1950). Other encoding schemes similar to Hamming codes include Golay codes. Briefly, Hamming codes, like other error-correcting codes, are based on the principle of redundancy and are constructed by adding redundant parity bits to data that is to be transmitted over a noisy medium. Such error-correcting codes encode sample identifiers with redundant parity bits, and “transmit” these sample identifiers as codewords. Although it is not necessary to understand the mechanism of an invention, it is believed that if each nucleotide base is encoded by two (2) bits, then an eight (8) nucleotide base codeword would comprise sixteen (16) bits of information for transmission.

[0098] Hamming codes may be represented by a subset of the possible codewords that are chosen from the center of multidimensional spheres (i.e., for example, hyperspheres) in a binary subspace. Single bit errors may fall within hyperspheres associated with a specific codeword and can thus be corrected. On the other hand, double bit errors that do not associate with a specific codeword can be detected, but not corrected. Consider a first hypersphere centered at coordinates (0, 0, 0) (i.e., for example, using an x-y-z coordinate system), wherein any single-bit error can be corrected by falling within a radius of 1 from the center coordinates; i.e., for example, single bit errors having the coordinates of (0, 0, 0); (0, 1, 0); (0, 0, 1); (1, 0, 0), or (1, 1, 0). Likewise, a second hypersphere may be constructed wherein single-bit errors can be corrected by falling within a radius of 1 of its center coordinates (1, 1, 1) (i.e., for example, (1,1,1); (1, 0, 1); (0 ,1, 0); or (0, 1, 1). See, FIG. 1A (first hypersphere-blue; second hypersphere-red).

[0099] Codeword regions comprising a length of 16 or more bits may be checked by parity bits at positions 0, 1, 2, and 4, wherein the bits that are checked by each position are marked with 1. See, FIG. 1B. Consequently, a “received” codeword containing a binary value of 3 (0011) (n=7, k=4) may be decoded for possible correction. The first case contains no errors; the second contains a single-bit error at position 6 that is detected and corrected. See, FIG. 3. Note that this is an example of a Hamming error-correcting code: the method claims all error-detecting and error-correcting codes.

[0100] For example, let n be the total number of bits in the codeword being transmitted, and k be the number of bits of information to be transmitted. Hamming codes use n-k bits of redundancy, and because not all 2ⁿ possible codewords are used, there are 2^{k} valid, error-correcting codewords is 2^{k} that form a k-dimensional subspace. The Hamming distance is defined as the number of bits that differ between two vectors in this subspace, and the relevant parameter for error-correction is the minimum Hamming distance. Next, let t be the radius of a sphere in this subspace where any change within this sphere can be corrected. The error-correcting capability is the largest radius such that all Hamming spheres are disjoint: t=floor((dₘᵢₙ−1)/2), where dₘᵢₙ is the minimum Hamming distance. Thus, the minimum Hamming distance between codewords needed to correct a single error is 3.

[0101] In one embodiment, the present invention contemplates a barcode that uses Hamming codes to encode sample identifiers as DNA translations of each binary codeword using 2 bits/base. For example, 8-base codewords (n=16) use 11 bits for sample identifiers (k=11), and 5 bits of redundancy (n−k=5). There are thus 2¹¹=2048 possible 8-base codewords. Alternatively, a 4-base barcodes can encode up to 16 codewords, thereby generating 67 million 16-base codewords. One can easily using increasing base lengths to provide ready scalability.

### III. Error-Correction Hamming Codes in Pyrosequencing

[0102] Pyrosequencing may improve sequencing by eliminating the laborious step of producing clone libraries and generating hundreds of thousands of sequences in a single run. Margulies et al., Nature 437(7057):376 (2005). These improvements may include, for example, the ability to assess global microbial community diversity Huber et al., Science 318(5847):97 (2007); Roesch et al., ISME J 1:283 (2007); Sogin et al., Proc Natl Acad Sci USA 103:12115 (2006). In one embodiment, the present invention contemplates a method comprising pyrosequencing amplified nucleic acids containing Hamming barcoded error-correcting and/or error-detecting primers. In one embodiment, the method further comprises estimating the total sequencing error rate. In one embodiment, the method further comprises eliminating sample mis-assignment of the nucleic acid.

[0103] In one embodiment, the present invention contemplates a method comprising amplifying nucleic acids. In one embodiment, the amplification method may further comprise steps including, but not limited to, sequencing genes, detecting alleles, or diagnosing a medical condition. Further, a nucleic acid amplification method may comprise detecting and/or correcting nucleotide sequence errors as a research tool for understanding of microbial habitats.

[0104] The presently disclosed methods have several advantages over conventionally used pyrosequencing methods currently in use including, but not limited to: 1) the ability to detect and correct errors in the barcodes to eliminate possible mis-assignment; 2) the barcodes only require 8 nucleotides, which is important when read lengths are limited; and 3) the ability to tag only one end of the sequence (i.e., for example, tagging the reverse primer) is useful since variation in the length of variable regions in different species may preclude a second tag from being read.

[0105] Conventional culture-independent 16S rRNA-based analysis of microbial community composition through pyrosequencing has been limited by the expense of each individual run, and by the difficulty of splitting a single plate across multiple runs. N. R. Pace, Science 276(5313): 734 (1997). Several reports have suggested that a barcode (i.e., a unique tag) may be added to each primer before PCR amplification. Binladen et al., PLoS ONE 2 (2), e197 (2007): Hoffmann et al., Nucleic Acids Res 35 (13), e91 (2007); and Parameswaran et al., Nucleic Acids Res 35 (19), e130 (2007). In one embodiment, the present invention contemplates a method comprising amplifying each sample with a known tagged primer, wherein the subsequent sequencing can be performed on an equimolar mixture of PCR-amplified DNA from each sample, thereby allowing the sequences to be assigned to samples based on the unique barcode.

[0106] Disadvantages of such conventional pyrosequencing barcoding methods (supra) include, but are not limited to: i) sequencing only twenty-five samples in a single pyrosequencing run; ii) a limited number of usable unique barcodes; or iii) an ability to detect sequencing errors that change sample assignment and/or identification. Although it is not necessary to understand the mechanism of an invention, it is believed that overcoming these disadvantages by using pyrosequencing in conjunction with Hamming barcodes will create a highly robust method that maintains an error-free sample assignment code. For example, because the 5′ end of the read is generally considered more error-prone than other nucleotide regions the presently disclosed invention is believed to solve this problem. Huse et al., Genome Biol 8:R143 (2007).

[0107] A. Identifying Nucleic Acid Sequences Tagged with Bar Codes

[0108] In one embodiment, the present invention contemplates an improved method for culture-independent 16S rRNA pyrosequencing analysis that reduces both cost and error rate by processing more than 25 samples in a single pyrosequencing run. PCR amplification of each sample with unique barcode tagged primers prior to pyrosequencing permits an assignment of sequence data to individual samples from equimolar mixtures of PCR-amplified DNA.

[0109] In one embodiment, the present invention contemplates a barcode based on error-correcting Hamming codes that use a minimum amount of redundancy and are implemented using standard linear algebraic techniques. In addition to increasing the numbers of unique barcodes available, error-correcting barcodes are able to detect and/or correct sequencing errors. Although it is not necessary to understand the mechanism of an invention, it is believed that such sequencing errors occurring within a barcode are sufficient to change sample identification assignments. This technique is readily scalable, for example while an 8-base barcode upon which the present primers were created provide 2,048 possible combinations, a 4-base barcode would provide 16 possible combinations, and a 16-base barcode would provide 67 million possible combinations.

[0110] In one embodiment, the present invention contemplates using a Hamming code analysis to identify an 8-base barcode scheme using the nucleotides including but not limited to, adenosine (A), thymidine (T), cytosine (C), or guano sine (G) (i.e., for example, at least 1544 barcodes). See, Table 1.

TABLE 1
Representative 8-Nucleotide Base
Error-Correcting Barcodes And
Representative Primer Sequence

| Barcode | Primer |
|---|---|
| AACCAACC | GCTCCCTCGCGCCATCAGAACCAACCCATGCTC |
| SEQ ID NO: 1 | GCCTCCCGTAGGAGT |
| | SEQ ID NO: 2 |
| AACCAAGG | GCCTCCCTCGCGCCATCAGAACCAAGGCATGCT |
| SEQ ID NO: 3 | GCCTCCCGTAGGAGT |
| | SEQ ID NO: 4 |
| AACCATCG | GCCTCCCTCGCGCCATCAGAACCATCGCATGCT |
| SEQ ID NO: 5 | GCCTCCCGTAGGAGT |
| | SEQ ID NO: 6 |
| AACCATGC | GCCTCCCTCGCGCCATCAGAACCATGCCATGCT |
| SEQ ID NO: 7 | GCCTCCCGTAGGAGT |
| | SEQ ID NO: 8 |
| AACCGCAT | GCCTCCCTCGCGCCATCAGAACCGCATCATGCT |
| SEQ ID NO: 9 | GCCTCCCGTAGGAGT |
| | SEQ ID NO: 10 |
| AACCGCTA | GCCTCCCTCGCGCCATCAGAACCGCTACATGCT |
| SEQ ID NO: 11 | GCCTCCCGTAGGAGT |
| | SEQ ID NO: 12 |
| AACCGGAA | GCCTCCCTCGCGCCATCAGAACCGGAACATGCT |
| SEQ ID NO: 13 | GCCTCCCGTAGGAGT |
| | SEQ ID NO: 14 |
| AACCGGTT | GCCTCCCTCGCGCCATCAGAACCGGTTCATGCT |
| SEQ ID NO: 15 | GCCTCCCGTAGGAGT |
| | SEQ ID NO: 16 |
| AACCTACG | GCCTCCCTCGCGCCATCAGAACCTACGCATGCT |
| SEQ ID NO: 17 | GCCTCCCGTAGGAGT |
| | SEQ ID NO: 18 |
| AACCTAGC | GCCTCCCTCGCGCCATCAGAACCTAGCCATGCT |
| SEQ ID NO: 19 | GCCTCCCGTAGGAGT |
| | SEQ ID NO: 20 |
| AACCTTCC | GCCTCCCTCGCGCCATCAGAACCTTCCCATGCT |
| SEQ ID NO: 21 | GCCTCCCGTAGGAGT |
| | SEQ ID NO: 22 |
| AACCTTGG | GCCTCCCTCGCGCCATCAGAACCTTGGCATGCT |
| SEQ ID NO: 23 | GCCTCCCGTAGGAGT |
| | SEQ ID NO: 24 |
| AACGAACG | GCCTCCCTCGCGCCATCAGAACGAACGCATGCT |
| SEQ ID NO: 25 | GCCTCCCGTAGGAGT |
| | SEQ ID NO: 26 |
| AACGAAGC | GCCTCCCTCGCGCCATCAGAACGAAGCCATGCT |
| SEQ ID NO: 27 | GCCTCCCGTAGGAGT |
| | SEQ ID NO: 28 |
| AACGATCC | GCCTCCCTCGCGCCATCAGAACGATCCCATGCT |
| SEQ ID NO: 29 | GCCTCCCGTAGGAGT |
| | SEQ ID NO: 30 |
| AACGATGG | GCCTCCCTCGCGCCATCAGAACGATGGCATGCT |
| SEQ ID NO: 31 | GCCTCCCGTAGGAGT |
| | SEQ ID NO: 32 |
| AACGCCAT | GCCTCCCTCGCGCCATCAGAACGCCATCATGCT |
| SEQ ID NO: 33 | GCCTCCCGTAGGAGT |
| | SEQ ID NO: 34 |
| AACGCCTA | GCCTCCCTCGCGCCATCAGAACGCCTACATGCT |
| SEQ ID NO: 35 | GCCTCCCGTAGGAGT |
| | SEQ ID NO: 36 |
| AACGCGAA | GCCTCCCTCGCGCCATCAGAACGCGAACATGCT |
| SEQ ID NO: 37 | GCCTCCCGTAGGAGT |
| | SEQ ID NO: 38 |
| AACGCGTT | GCCTCCCTCGCGCCATCAGAACGCGTTCATGCT |
| SEQ ID NO: 39 | GCCTCCCGTAGGAGT |
| | SEQ ID NO: 40 |
| AACGGCAA | GCCTCCCTCGCGCCATCAGAACGGCAACATGCT |
| SEQ ID NO: 41 | GCCTCCCGTAGGAGT |
| | SEQ ID NO: 42 |
| AACGGCTT | GCCTCCCTCGCGCCATCAGAACGGCTTCATGCT |
| SEQ ID NO: 43 | GCCTCCCGTAGGAGT |
| | SEQ ID NO: 44 |
| AACGTACC | GCCTCCCTCGCGCCATCAGAACGTACCCATGCT |
| SEQ ID NO: 45 | GCCTCCCGTAGGAGT |
| | SEQ ID NO: 46 |
| AACGTAGG | GCCTCCCTCGCGCCATCAGAACGTAGGCATGCT |
| SEQ ID NO: 47 | CTCCCGTAGGAGT |
| | SEQ ID NO: 48 |
| AACGTTCG | GCCTCCCTCGCGCCATCAGAACGTTCGCATGCT |
| SEQ ID NO: 49 | GCCTCCCGTAGGAGT |
| | SEQ ID NO: 50 |
| AACGTTGC | GCCTCCCTCGCGCCATCAGAACGTTGCCATGCT |
| SEQ ID NO: 51 | GCCTCCCGTAGGAGT |
| | SEQ ID NO: 52 |
| AAGCAACG | GCCTCCCTCGCGCCATCAGAAGCAACGCATGCT |
| SEQ ID NO: 53 | GCCTCCCGTAGGAGT |
| | SEQ ID NO: 54 |
| AAGCAAGC | GCCTCCCTCGCGCCATCAGAAGCAAGCCATGCT |
| SEQ ID NO: 55 | GCCTCCCGTAGGAGT |
| | SEQ ID NO: 56 |
| AAGCATCC | GCCTCCCTCGCGCCATCAGAAGCATCCCATGCT |
| SEQ ID NO: 57 | GCCTCCCGTAGGAGT |
| | SEQ ID NO: 58 |
| AAGCATGG | GCCTCCCTCGCGCCATCAGAAGCATGGCATGCT |
| SEQ ID NO: 59 | GCCTCCCGTAGGAGT |
| | SEQ ID NO: 60 |
| AAGCCGAA | GCCTCCCTCGCGCCATCAGAAGCCGAACATGCT |
| SEQ ID NO: 61 | GCCTCCCGTAGGAGT |
| | SEQ ID NO: 62 |
| AAGCCGTT | GCCTCCCTCGCGCCATCAGAAGCCGTTCATGCT |
| SEQ ID NO: 63 | GCCTCCCGTAGGAGT |
| | SEQ ID NO: 64 |
| AAGCGCAA | GCCTCCCTCGCGCCATCAGAAGCGCAACATGCT |
| SEQ ID NO: 65 | GCCTCCCGTAGGAGT |
| | SEQ ID NO: 66 |
| AAGCGCTT | GCCTCCCTCGCGCCATCAGAAGCGCTTCATGCT |
| SEQ ID NO: 67 | GCCTCCCGTAGGAGT |
| | SEQ ID NO: 68 |
| AAGCGGAT | GCCTCCCTCGCGCCATCAGAAGCGGATCATGCT |
| SEQ ID NO: 69 | GCCTCCCGTAGGAGT |
| | SEQ ID NO: 70 |
| AAGCGGTA | GCCTCCCTCGCGCCATCAGAAGCGGTACATGCT |
| SEQ ID NO: 71 | GCCTCCCGTAGGAGT |
| | SEQ ID NO: 72 |
| AAGCTACC | GCCTCCCTCGCGCCATCAGAAGCTACCCATGCT |
| SEQ ID NO: 73 | GCCTCCCGTAGGAGT |
| | SEQ ID NO: 74 |
| AAGCTAGG | GCCTCCCTCGCGCCATCAGAAGCTAGGCATGCT |
| SEQ ID NO: 75 | GCCTCCCGTAGGAGT |
| | SEQ ID NO: 76 |
| AAGCTTCG | GCCTCCCTCGCGCCATCAGAAGCTTCGCATGCT |
| SEQ ID NO: 77 | GCCTCCCGTAGGAGT |
| | SEQ ID NO: 78 |
| AAGCTTGC | GCCTCCCTCGCGCCATCAGAAGCTTGCCATGCT |
| SEQ ID NO: 79 | GCCTCCCGTAGGAGT |
| | SEQ ID NO: 80 |
| AAGGAACC | GCCTCCCTCGCGCCATCAGAAGGAACCCATGCT |
| SEQ ID NO: 81 | GCCTCCCGTAGGAGT |
| | SEQ ID NO: 82 |
| AAGGAAGG | GCCTCCCTCGCGCCATCAGAAGGAAGGCATGCT |
| SEQ ID NO: 83 | GCCTCCCGTAGGAGT |
| | SEQ ID NO: 84 |
| AAGGATCG | GCCTCCCTCGCGCCATCAGAAGGATCGCATGCT |
| SEQ ID NO: 85 | GCCTCCCGTAGGAGT |
| | SEQ ID NO: 86 |
| AAGGATGC | GCCTCCCTCGCGCCATCAGAAGGATGCCATGCT |
| SEQ ID NO: 87 | GCCTCCCGTAGGAGT |
| | SEQ ID NO: 88 |
| AAGGCCAA | GCCTCCCTCGCGCCATCAGAAGGCCAACATGCT |
| SEQ ID NO: 89 | GCCTCCCGTAGGAGT |
| | SEQ ID NO: 90 |
| AAGGCCTT | GCCTCCCTCGCGCCATCAGAAGGCCTTCATGCT |
| SEQ ID NO: 91 | GCCTCCCGTAGGAGT |
| | SEQ ID NO: 92 |
| AAGGCGAT | GCCTCCCTCGCGCCATCAGAAGGCGATCATGCT |
| SEQ ID NO: 93 | GCCTCCCGTAGGAGT |
| | SEQ ID NO: 94 |
| AAGGCGTA | GCCTCCCTCGCGCCATCAGAAGGCGTACATGCT |
| SEQ ID NO: 95 | GCCTCCCGTAGGAGT |
| | SEQ ID NO: 96 |
| AAGGTACG | GCCTCCCTCGCGCCATCAGAAGGTACGCATGCT |
| SEQ ID NO: 97 | GCCTCCCGTAGGAGT |
| | SEQ ID NO: 98 |
| AAGGTAGC | GCCTCCCTCGCGCCATCAGAAGGTAGCCATGCT |
| SEQ ID NO: 99 | GCCTCCCGTAGGAGT |
| | SEQ ID NO: 100 |
| AAGGTTCC | GCCTCCCTCGCGCCATCAGAAGGTTCCCATGCT |
| SEQ ID NO: 101 | GCCTCCCGTAGGAGT |
| | SEQ ID NO: 102 |
| AAGGTTGG | GCCTCCCTCGCGCCATCAGAAGGTTGGCATGCT |
| SEQ ID NO: 103 | GCCTCCCGTAGGAGT |
| | SEQ ID NO: 104 |
| AATACCGC | GCCTCCCTCGCGCCATCAGAATACCGCCATGCT |
| SEQ ID NO: 104 | GCCTCCCGTAGGAGT |
| | SEQ ID NO: 106 |
| AATACGCC | GCCTCCCTCGCGCCATCAGAATACGCCCATGCT |
| SEQ ID NO: 107 | GCCTCCCGTAGGAGT |
| | SEQ ID NO: 108 |
| AATAGCGG | GCCTCCCTCGCGCCATCAGAATAGCGGCATGCT |
| SEQ ID NO: 109 | GCCTCCCGTAGGAGT |
| | SEQ ID NO: 110 |
| AATAGGCG | GCCTCCCTCGCGCCATCAGAATAGGCGCATGCT |
| SEQ ID NO: 111 | GCCTCCCGTAGGAGT |
| | SEQ ID NO: 112 |
| AATTCCGG | GCCTCCCTCGCGCCATCAGAATTCCGGCATGCT |
| SEQ ID NO: 113 | GCCTCCCGTAGGAGT |
| | SEQ ID NO: 114 |
| AATTCGCG | GCCTCCCTCGCGCCATCAGAATTCGCGCATGCT |
| SEQ ID NO: 115 | GCCTCCCGTAGGAGT |
| | SEQ ID NO: 116 |
| AATTCGGC | GCCTCCCTCGCGCCATCAGAATTCGGCCATGCT |
| SEQ ID NO: 117 | GCCTCCCGTAGGAGT |
| | SEQ ID NO: 118 |
| AATTGCCG | GCCTCCCTCGCGCCATCAGAATTGCCGCATGCT |
| SEQ ID NO: 119 | GCCTCCCGTAGGAGT |
| | SEQ ID NO: 120 |
| AATTGCGC | GCCTCCCTCGCGCCATCAGAATTGCGCCATGCT |
| SEQ ID NO: 121 | GCCTCCCGTAGGAGT |
| | SEQ ID NO: 122 |
| AATTGGCC | GCCTCCCTCGCGCCATCAGAATTGGCCCATGCT |
| SEQ ID NO: 123 | GCCTCCCGTAGGAGT |
| | SEQ ID NO: 124 |
| ACACACAC | GCCTCCCTCGCGCCATCAGACACACACCATGCT |
| SEQ ID NO: 125 | GCCTCCCGTAGGAGT |
| | SEQ ID NO: 126 |
| ACACACTG | GCCTCCCTCGCGCCATCAGACACACTGCATGCT |
| SEQ ID NO: 127 | GCCTCCCGTAGGAGT |
| | SEQ ID NO: 128 |
| ACACAGAG | GCCTCCCTCGCGCCATCAGACACAGAGCATGCT |
| SEQ ID NO: 129 | GCCTCCCGTAGGAGT |
| | SEQ ID NO: 130 |
| ACACAGTC | GCCTCCCTCGCGCCATCAGACACAGTCCATGCT |
| SEQ ID NO: 131 | GCCTCCCGTAGGAGT |
| | SEQ ID NO: 132 |
| ACACCACA | GCCTCCCTCGCGCCATCAGACACCACACATGCT |
| SEQ ID NO: 133 | GCCTCCCGTAGGAGT |
| | SEQ ID NO: 134 |
| ACACCAGT | GCCTCCCTCGCGCCATCAGACACCAGTCATGCT |
| SEQ ID NO: 135 | GCCTCCCGTAGGAGT |
| | SEQ ID NO: 136 |
| ACACCTCT | GCCTCCCTCGCGCCATCAGACACCTCTCATGCT |
| SEQ ID NO: 137 | GCCTCCCGTAGGAGT |
| | SEQ ID NO: 138 |
| ACACCTGA | GCCTCCCTCGCGCCATCAGACACCTGACATGCT |
| SEQ ID NO: 139 | GCCTCCCGTAGGAGT |
| | SEQ ID NO: 140 |
| ACACGACT | GCCTCCCTCGCGCCATCAGACACGACTCATGCT |
| SEQ ID NO: 141 | GCCTCCCGTAGGAGT |
| | SEQ ID NO: 142 |
| ACACGAGA | GCCTCCCTCGCGCCATCAGACACGAGACATGCT |
| SEQ ID NO: 143 | GCCTCCCGTAGGAGT |
| | SEQ ID NO: 144 |
| ACACGTCA | GCCTCCCTCGCGCCATCAGACACGTCACATGCT |
| SEQ ID NO: 145 | GCCTCCCGTAGGAGT |
| | SEQ ID NO: 146 |
| ACACGTGT | GCCTCCCTCGCGCCATCAGACACGTGTCATGCT |
| SEQ ID NO: 147 | GCCTCCCGTAGGAGT |
| | SEQ ID NO: 148 |
| ACACTCAG | GCCTCCCTCGCGCCATCAGACACTCAGCATGCT |
| SEQ ID NO: 149 | GCCTCCCGTAGGAGT |
| | SEQ ID NO: 150 |
| ACACTCTC | GCCTCCCTCGCGCCATCAGACACTCTCCATGCT |
| SEQ ID NO: 151 | GCCTCCCGTAGGAGT |
| | SEQ ID NO: 152 |
| ACACTGAC | GCCTCCCTCGCGCCATCAGACACTGACCATGCT |
| SEQ ID NO: 153 | GCCTCCCGTAGGAGT |
| | SEQ ID NO: 154 |
| ACACTGTG | GCCTCCCTCGCGCCATCAGACACTGTGCATGCT |
| SEQ ID NO: 155 | GCCTCCCGTAGGAGT |
| | SEQ ID NO: 156 |
| ACAGACAG | GCCTCCCTCGCGCCATCAGACAGACAGCATGCT |
| SEQ ID NO: 157 | GCCTCCCGTAGGAGT |
| | SEQ ID NO: 158 |
| ACAGACTC | GCCTCCCTCGCGCCATCAGACAGACTCCATGCT |
| SEQ ID NO: 159 | GCCTCCCGTAGGAGT |
| | SEQ ID NO: 160 |
| ACAGAGAC | GCCTCCCTCGCGCCATCAGACAGAGACCATGCT |
| SEQ ID NO: 161 | GCCTCCCGTAGGAGT |
| | SEQ ID NO: 162 |
| ACAGAGTG | GCCTCCCTCGCGCCATCAGACAGAGTGCATGCT |
| SEQ ID NO: 163 | GCCTCCCGTAGGAGT |
| | SEQ ID NO: 164 |
| ACAGCACT | GCCTCCCTCGCGCCATCAGACAGCACTCATGCT |
| SEQ ID NO: 165 | GCCTCCCGTAGGAGT |
| | SEQ ID NO: 166 |
| ACAGCAGA | GCCTCCCTCGCGCCATCAGACAGCAGACATGCT |
| SEQ ID NO: 167 | GCCTCCCGTAGGAGT |
| | SEQ ID NO: 168 |
| ACAGCTCA | GCCTCCCTCGCGCCATCAGACAGCTCACATGCT |
| SEQ ID NO: 169 | GCCTCCCGTAGGAGT |
| | SEQ ID NO: 170 |
| ACAGCTGT | GCCTCCCTCGCGCCATCAGACAGCTGTCATGCT |
| SEQ ID NO: 171 | GCCTCCCGTAGGAGT |
| | SEQ ID NO: 172 |
| ACAGGACA | GCCTCCCTCGCGCCATCAGACAGGACACATGCT |
| SEQ ID NO: 173 | GCCTCCCGTAGGAGT |
| | SEQ ID NO: 174 |
| ACAGGAGT | GCCTCCCTCGCGCCATCAGACAGGAGTCATGCT |
| SEQ ID NO: 175 | GCCTCCCGTAGGAGT |
| | SEQ ID NO: 176 |
| ACAGGTCT | GCCTCCCTCGCGCCATCAGACAGGTCTCATGCT |
| SEQ ID NO: 177 | GCCTCCCGTAGGAGT |
| | SEQ ID NO: 178 |
| ACAGGTGA | GCCTCCCTCGCGCCATCAGACAGGTGACATGCT |
| SEQ ID NO: 179 | GCCTCCCGTAGGAGT |
| | SEQ ID NO: 180 |
| ACAGTCAC | GCCTCCCTCGCGCCATCAGACAGTCACCATGCT |
| SEQ ID NO: 181 | GCCTCCCGTAGGAGT |
| | SEQ ID NO: 182 |
| ACAGTCTG | GCCTCCCTCGCGCCATCAGACAGTCTGCATGCT |
| SEQ ID NO: 183 | GCCTCCCGTAGGAGT |
| | SEQ ID NO: 184 |
| ACAGTGAG | GCCTCCCTCGCGCCATCAGACAGTGAGCATGCT |
| SEQ ID NO: 185 | GCCTCCCGTAGGAGT |
| | SEQ ID NO: 186 |
| ACAGTGTC | GCCTCCCTCGCGCCATCAGACAGTGTCCATGCT |
| SEQ ID NO: 187 | GCCTCCCGTAGGAGT |
| | SEQ ID NO: 188 |
| ACCAACCA | GCCTCCCTCGCGCCATCAGACCAACCACATGCT |
| SEQ ID NO: 189 | GCCTCCCGTAGGAGT |
| | SEQ ID NO: 190 |
| ACCAACGT | GCCTCCCTCGCGCCATCAGACCAACGTCATGCT |
| SEQ ID NO: 191 | GCCTCCCGTAGGAGT |
| | SEQ ID NO: 192 |
| ACCAAGCT | GCCTCCCTCGCGCCATCAGACCAAGCTCATGCT |
| SEQ ID NO: 193 | GCCTCCCGTAGGAGT |
| | SEQ ID NO: 194 |
| ACCAAGGA | GCCTCCCTCGCGCCATCAGACCAAGGACATGCT |
| SEQ ID NO: 195 | GCCTCCCGTAGGAGT |
| | SEQ ID NO: 196 |
| ACCACAAC | GCCTCCCTCGCGCCATCAGACCACAACCATGCT |
| SEQ ID NO: 197 | GCCTCCCGTAGGAGT |
| | SEQ ID NO: 198 |
| ACCACATG | GCCTCCCTCGCGCCATCAGACCACATGCATGCT |
| SEQ ID NO: 199 | GCCTCCCGTAGGAGT |
| | SEQ ID NO: 200 |
| ACCACTAG | GCCTCCCTCGCGCCATCAGACCACTAGCATGCT |
| SEQ ID NO: 201 | GCCTCCCGTAGGAGT |
| | SEQ ID NO: 202 |
| ACCACTTC | GCCTCCCTCGCGCCATCAGACCACTTCCATGCT |
| SEQ ID NO: 203 | GCCTCCCGTAGGAGT |
| | SEQ ID NO: 204 |
| ACCAGAAG | GCCTCCCTCGCGCCATCAGACCAGAAGCATGCT |
| SEQ ID NO: 205 | GCCTCCCGTAGGAGT |
| | SEQ ID NO: 206 |
| ACCAGATC | GCCTCCCTCGCGCCATCAGACCAGATCCATGCT |
| SEQ ID NO: 207 | GCCTCCCGTAGGAGT |
| | SEQ ID NO: 208 |
| ACCAGTAC | GCCTCCCTCGCGCCATCAGACCAGTACCATGCT |
| SEQ ID NO: 209 | GCCTCCCGTAGGAGT |
| | SEQ ID NO: 210 |
| ACCAGTTG | GCCTCCCTCGCGCCATCAGACCAGTTGCATGCT |
| SEQ ID NO: 211 | GCCTCCCGTAGGAGT |
| | SEQ ID NO: 212 |
| ACCATCCT | GCCTCCCTCGCGCCATCAGACCATCCTCATGCT |
| SEQ ID NO: 213 | GCCTCCCGTAGGAGT |
| | SEQ ID NO: 214 |
| ACCATCGA | GCCTCCCTCGCGCCATCAGACCATCGACATGCT |
| SEQ ID NO: 215 | GCCTCCCGTAGGAGT |
| | SEQ ID NO: 216 |
| ACCATGCA | GCCTCCCTCGCGCCATCAGACCATGCACATGCT |
| SEQ ID NO: 217 | GCCTCCCGTAGGAGT |
| | SEQ ID NO: 218 |
| ACCATGGT | GCCTCCCTCGCGCCATCAGACCATGGTCATGCT |
| SEQ ID NO: 219 | GCCTCCCGTAGGAGT |
| | SEQ ID NO: 220 |
| ACCTACCT | GCCTCCCTCGCGCCATCAGACCTACCTCATGCT |
| SEQ ID NO: 221 | GCCTCCCGTAGGAGT |
| | SEQ ID NO: 222 |
| ACCTACGA | GCCTCCCTCGCGCCATCAGACCTACGACATGCT |
| SEQ ID NO: 223 | GCCTCCCGTAGGAGT |
| | SEQ ID NO: 224 |
| ACCTAGCA | GCCTCCCTCGCGCCATCAGACCTAGCACATGCT |
| SEQ ID NO: 225 | GCCTCCCGTAGGAGT |
| | SEQ ID NO: 226 |
| ACCTAGGT | GCCTCCCTCGCGCCATCAGACCTAGGTCATGCT |
| SEQ ID NO: 227 | GCCTCCCGTAGGAGT |
| | SEQ ID NO: 228 |
| ACCTCAAG | GCCTCCCTCGCGCCATCAGACCTCAAGCATGCT |
| SEQ ID NO: 229 | GCCTCCCGTAGGAGT |
| | SEQ ID NO: 230 |
| ACCTCATC | GCCTCCCTCGCGCCATCAGACCTCATCCATGCT |
| SEQ ID NO: 231 | GCCTCCCGTAGGAGT |
| | SEQ ID NO: 232 |
| ACCTCTAC | GCCTCCCTCGCGCCATCAGACCTCTACCATGCT |
| SEQ ID NO: 233 | GCCTCCCGTAGGAGT |
| | SEQ ID NO: 234 |
| ACCTCTTG | GCCTCCCTCGCGCCATCAGACCTCTTGCATGCT |
| SEQ ID NO: 235 | GCCTCCCGTAGGAGT |
| | SEQ ID NO: 236 |
| ACCTGAAC | GCCTCCCTCGCGCCATCAGACCTGAACCATGCT |
| SEQ ID NO: 237 | GCCTCCCGTAGGAGT |
| | SEQ ID NO: 238 |
| ACCTGATG | GCCTCCCTCGCGCCATCAGACCTGATGCATGCT |
| SEQ ID NO: 239 | GCCTCCCGTAGGAGT |
| | SEQ ID NO: 240 |
| ACCTGTAG | GCCTCCCTCGCGCCATCAGACCTGTAGCATGCT |
| SEQ ID NO: 241 | GCCTCCCGTAGGAGT |
| | SEQ ID NO: 242 |
| ACCTGTTC | GCCTCCCTCGCGCCATCAGACCTGTTCCATGCT |

| | |
|---|---|
| SEQ ID NO: 243 | GCCTCCCGTAGGAGT |
| | SEQ ID NO: 244 |
| ACCTTCCA | GCCTCCCTCGCGCCATCAGACCTTCCACATGCT |
| SEQ ID NO: 245 | GCCTCCCGTAGGAGT |
| | SEQ ID NO: 246 |
| ACCTTCGT | GCCTCCCTCGCGCCATCAGACCTTCGTCATGCT |
| SEQ ID NO: 247 | GCCTCCCGTAGGAGT |
| | SEQ ID NO: 248 |
| ACCTTGCT | GCCTCCCTCGCGCCATCAGACCTTGCTCATGCT |
| SEQ ID NO: 249 | GCCTCCCGTAGGAGT |
| | SEQ ID NO: 250 |
| ACCTTGGA | GCCTCCCTCGCGCCATCAGACCTTGGACATGCT |
| SEQ ID NO: 251 | GCCTCCCGTAGGAGT |
| | SEQ ID NO: 252 |
| ACGAACCT | GCCTCCCTCGCGCCATCAGACGAACCTCATGCT |
| SEQ ID NO: 253 | GCCTCCCGTAGGAGT |
| | SEQ ID NO: 254 |
| ACGAACGA | GCCTCCCTCGCGCCATCAGACGAACGACATGCT |
| SEQ ID NO: 255 | GCCTCCCGTAGGAGT |
| | SEQ ID NO: 256 |
| ACGAAGCA | GCCTCCCTCGCGCCATCAGACGAAGCACATGCT |
| SEQ ID NO: 257 | GCCTCCCGTAGGAGT |
| | SEQ ID NO: 258 |
| ACGAAGGT | GCCTCCCTCGCGCCATCAGACGAAGGTCATGCT |
| SEQ ID NO: 259 | GCCTCCCGTAGGAGT |
| | SEQ ID NO: 260 |
| ACGACAAG | GCCTCCCTCGCGCCATCAGACGACAAGCATGCT |
| SEQ ID NO: 261 | GCCTCCCGTAGGAGT |
| | SEQ ID NO: 262 |
| ACGACATC | GCCTCCCTCGCGCCATCAGACGACATCCATGCT |
| SEQ ID NO: 263 | GCCTCCCGTAGGAGT |
| | SEQ ID NO: 264 |
| ACGACTAC | GCCTCCCTCGCGCCATCAGACGACTACCATGCT |
| SEQ ID NO: 265 | GCCTCCCGTAGGAGT |
| | SEQ ID NO: 266 |
| ACGACTTG | GCCTCCCTCGCGCCATCAGACGACTTGCATGCT |
| SEQ ID NO: 267 | GCCTCCCGTAGGAGT |
| | SEQ ID NO: 268 |
| ACGAGAAC | GCCTCCCTCGCGCCATCAGACGAGAACCATGCT |
| SEQ ID NO: 269 | GCCTCCCGTAGGAGT |
| | SEQ ID NO: 270 |
| ACGAGATG | GCCTCCCTCGCGCCATCAGACGAGATGCATGCT |
| SEQ ID NO: 271 | GCCTCCCGTAGGAGT |
| | SEQ ID NO: 272 |
| ACGAGTAG | GCCTCCCTCGCGCCATCAGACGAGTAGCATGCT |
| SEQ ID NO: 273 | GCCTCCCGTAGGAGT |
| | SEQ ID NO: 274 |
| ACGAGTTC | GCCTCCCTCGCGCCATCAGACGAGTTCCATGCT |
| SEQ ID NO: 275 | GCCTCCCGTAGGAGT |
| | SEQ ID NO: 276 |
| ACGATCCA | GCCTCCCTCGCGCCATCAGACGATCCACATGCT |
| SEQ ID NO: 277 | GCCTCCCGTAGGAGT |
| | SEQ ID NO: 278 |
| ACGATCGT | GCCTCCCTCGCGCCATCAGACGATCGTCATGCT |
| SEQ ID NO: 279 | GCCTCCCGTAGGAGT |
| | SEQ ID NO: 280 |
| ACGATGCT | GCCTCCCTCGCGCCATCAGACGATGCTCATGCT |
| SEQ ID NO: 281 | GCCTCCCGTAGGAGT |
| | SEQ ID NO: 282 |
| ACGATGGA | GCCTCCCTCGCGCCATCAGACGATGGACATGCT |
| SEQ ID NO: 283 | GCCTCCCGTAGGAGT |
| | SEQ ID NO: 284 |
| ACGTACCA | GCCTCCCTCGCGCCATCAGACGTACCACATGCT |
| SEQ ID NO: 285 | GCCTCCCGTAGGAGT |
| | SEQ ID NO: 286 |
| ACGTACGT | GCCTCCCTCGCGCCATCAGACGTACGTCATGCT |
| SEQ ID NO: 287 | GCCTCCCGTAGGAGT |
| | SEQ ID NO: 288 |
| ACGTAGCT | GCCTCCCTCGCGCCATCAGACGTAGCTCATGCT |
| SEQ ID NO: 289 | GCCTCCCGTAGGAGT |
| | SEQ ID NO: 290 |
| ACGTAGGA | GCCTCCCTCGCGCCATCAGACGTAGGACATGCT |
| SEQ ID NO: 291 | GCCTCCCGTAGGAGT |
| | SEQ ID NO: 292 |
| ACGTCAAC | GCCTCCCTCGCGCCATCAGACGTCAACCATGCT |
| SEQ ID NO: 293 | GCCTCCCGTAGGAGT |
| | SEQ ID NO: 294 |
| ACGTCATG | GCCTCCCTCGCGCCATCAGACGTCATGCATGCT |
| SEQ ID NO: 295 | GCCTCCCGTAGGAGT |
| | SEQ ID NO: 296 |
| ACGTCTAG | GCCTCCCTCGCGCCATCAGACGTCTAGCATGCT |
| SEQ ID NO: 297 | GCCTCCCGTAGGAGT |
| | SEQ ID NO: 298 |
| ACGTCTTC | GCCTCCCTCGCGCCATCAGACGTCTTCCATGCT |
| SEQ ID NO: 299 | GCCTCCCGTAGGAGT |
| | SEQ ID NO: 300 |
| ACGTGAAG | GCCTCCCTCGCGCCATCAGACGTGAAGCATGCT |
| SEQ ID NO: 301 | GCCTCCCGTAGGAGT |
| | SEQ ID NO: 302 |
| ACGTGATC | GCCTCCCTCGCGCCATCAGACGTGATCCATGCT |
| SEQ ID NO: 303 | GCCTCCCGTAGGAGT |
| | SEQ ID NO: 304 |
| ACGTGTAC | GCCTCCCTCGCGCCATCAGACGTGTACCATGCT |
| SEQ ID NO: 305 | GCCTCCCGTAGGAGT |
| | SEQ ID NO: 306 |
| ACGTGTTG | GCCTCCCTCGCGCCATCAGACGTGTTGCATGCT |
| SEQ ID NO: 307 | GCCTCCCGTAGGAGT |
| | SEQ ID NO: 308 |
| ACGTTCCT | GCCTCCCTCGCGCCATCAGACGTTCCTCATGCT |
| SEQ ID NO: 309 | GCCTCCCGTAGGAGT |
| | SEQ ID NO: 310 |
| ACGTTCGA | GCCTCCCTCGCGCCATCAGACGTTCGACATGCT |
| SEQ ID NO: 311 | GCCTCCCGTAGGAGT |
| | SEQ ID NO: 312 |
| ACGTTGCA | GCCTCCCTCGCGCCATCAGACGTTGCACATGCT |
| SEQ ID NO: 313 | GCCTCCCGTAGGAGT |
| | SEQ ID NO: 314 |
| ACGTTGGT | GCCTCCCTCGCGCCATCAGACGTTGGTCATGCT |
| SEQ ID NO: 315 | GCCTCCCGTAGGAGT |
| | SEQ ID NO: 316 |
| ACTCACAG | GCCTCCCTCGCGCCATCAGACTCACAGCATGCT |
| SEQ ID NO: 317 | GCCTCCCGTAGGAGT |
| | SEQ ID NO: 318 |
| ACTCACTC | GCCTCCCTCGCGCCATCAGACTCACTCCATGCT |
| SEQ ID NO: 319 | GCCTCCCGTAGGAGT |
| | SEQ ID NO: 320 |
| ACTCAGAC | GCCTCCCTCGCGCCATCAGACTCAGACCATGCT |
| SEQ ID NO: 321 | GCCTCCCGTAGGAGT |
| | SEQ ID NO: 322 |
| ACTCAGTG | GCCTCCCTCGCGCCATCAGACTCAGTGCATGCT |
| SEQ ID NO: 323 | GCCTCCCGTAGGAGT |
| | SEQ ID NO: 324 |
| ACTCCACT | GCCTCCCTCGCGCCATCAGACTCCACTCATGCT |
| SEQ ID NO: 325 | GCCTCCCGTAGGAGT |
| | SEQ ID NO: 326 |
| ACTCCAGA | GCCTCCCTCGCGCCATCAGACTCCAGACATGCT |
| SEQ ID NO: 327 | GCCTCCCGTAGGAGT |
| | SEQ ID NO: 328 |
| ACTCCTCA | GCCTCCCTCGCGCCATCAGACTCCTCACATGCT |
| SEQ ID NO: 329 | GCCTCCCGTAGGAGT |
| | SEQ ID NO: 330 |
| ACTCCTGT | GCCTCCCTCGCGCCATCAGACTCCTGTCATGCT |
| SEQ ID NO: 331 | GCCTCCCGTAGGAGT |
| | SEQ ID NO: 332 |
| ACTCGACA | GCCTCCCTCGCGCCATCAGACTCGACACATGCT |
| SEQ ID NO: 333 | GCCTCCCGTAGGAGT |
| | SEQ ID NO: 334 |
| ACTCGAGT | GCCTCCCTCGCGCCATCAGACTCGAGTCATGCT |
| SEQ ID NO: 335 | GCCTCCCGTAGGAGT |
| | SEQ ID NO: 336 |
| ACTCGTCT | GCCTCCCTCGCGCCATCAGACTCGTCTCATGCT |
| SEQ ID NO: 337 | GCCTCCCGTAGGAGT |
| | SEQ ID NO: 338 |
| ACTCGTGA | GCCTCCCTCGCGCCATCAGACTCGTGACATGCT |
| SEQ ID NO: 339 | GCCTCCCGTAGGAGT |
| | SEQ ID NO: 340 |
| ACTCTCAC | GCCTCCCTCGCGCCATCAGACTCTCACCATGCT |
| SEQ ID NO: 341 | GCCTCCCGTAGGAGT |
| | SEQ ID NO: 342 |
| ACTCTCTG | GCCTCCCTCGCGCCATCAGACTCTCTGCATGCT |
| SEQ ID NO: 343 | GCCTCCCGTAGGAGT |
| | SEQ ID NO: 344 |
| ACTCTGAG | GCCTCCCTCGCGCCATCAGACTCTGAGCATGCT |
| SEQ ID NO: 345 | GCCTCCCGTAGGAGT |
| | SEQ ID NO: 346 |
| ACTCTGTC | GCCTCCCTCGCGCCATCAGACTCTGTCCATGCT |
| SEQ ID NO: 347 | GCCTCCCGTAGGAGT |
| | SEQ ID NO: 348 |
| ACTGACAC | GCCTCCCTCGCGCCATCAGACTGACACCATGCT |
| SEQ ID NO: 349 | GCCTCCCGTAGGAGT |
| | SEQ ID NO: 350 |
| ACTGACTG | GCCTCCCTCGCGCCATCAGACTGACTGCATGCT |
| SEQ ID NO: 351 | GCCTCCCGTAGGAGT |
| | SEQ ID NO: 352 |
| ACTGAGAG | GCCTCCCTCGCGCCATCAGACTGAGAGCATGCT |
| SEQ ID NO: 353 | GCCTCCCGTAGGAGT |
| | SEQ ID NO: 354 |
| ACTGAGTC | GCCTCCCTCGCGCCATCAGACTGAGTCCATGCT |
| SEQ ID NO: 355 | GCCTCCCGTAGGAGT |
| | SEQ ID NO: 356 |
| ACTGCACA | GCCTCCCTCGCGCCATCAGACTGCACACATGCT |
| SEQ ID NO: 357 | GCCTCCCGTAGGAGT |
| | SEQ ID NO: 358 |
| ACTGCAGT | GCCTCCCTCGCGCCATCAGACTGCAGTCATGCT |
| SEQ ID NO: 359 | GCCTCCCGTAGGAGT |
| | SEQ ID NO: 360 |
| ACTGCTCT | GCCTCCCTCGCGCCATCAGACTGCTCTCATGCT |
| SEQ ID NO: 361 | GCCTCCCGTAGGAGT |
| | SEQ ID NO: 362 |
| ACTGCTGA | GCCTCCCTCGCGCCATCAGACTGCTGACATGCT |
| SEQ ID NO: 363 | GCCTCCCGTAGGAGT |
| | SEQ ID NO: 364 |
| ACTGGACT | GCCTCCCTCGCGCCATCAGACTGGACTCATGCT |
| SEQ ID NO: 365 | GCCTCCCGTAGGAGT |
| | SEQ ID NO: 366 |
| ACTGGAGA | GCCTCCCTCGCGCCATCAGACTGGAGACATGCT |
| SEQ ID NO: 367 | GCCTCCCGTAGGAGT |
| | SEQ ID NO: 368 |
| ACTGGTCA | GCCTCCCTCGCGCCATCAGACTGGTCACATGCT |
| SEQ ID NO: 369 | GCCTCCCGTAGGAGT |
| | SEQ ID NO: 370 |
| ACTGGTGT | GCCTCCCTCGCGCCATCAGACTGGTGTCATGCT |
| SEQ ID NO: 371 | GCCTCCCGTAGGAGT |
| | SEQ ID NO: 372 |
| ACTGTCAG | GCCTCCCTCGCGCCATCAGACTGTCAGCATGCT |
| SEQ ID NO: 373 | GCCTCCCGTAGGAGT |
| | SEQ ID NO: 374 |
| ACTGTCTC | GCCTCCCTCGCGCCATCAGACTGTCTCCATGCT |
| SEQ ID NO: 375 | GCCTCCCGTAGGAGT |
| | SEQ ID NO: 376 |
| ACTGTGAC | GCCTCCCTCGCGCCATCAGACTGTGACCATGCT |
| SEQ ID NO: 377 | GCCTCCCGTAGGAGT |
| | SEQ ID NO: 378 |
| ACTGTGTG | GCCTCCCTCGCGCCATCAGACTGTGTGCATGCT |
| SEQ ID NO: 379 | GCCTCCCGTAGGAGT |
| | SEQ ID NO: 380 |
| AGACACAG | GCCTCCCTCGCGCCATCAGAGACACAGCATGCT |
| SEQ ID NO: 381 | GCCTCCCGTAGGAGT |
| | SEQ ID NO: 382 |
| AGACACTC | GCCTCCCTCGCGCCATCAGAGACACTCCATGCT |
| SEQ ID NO: 383 | GCCTCCCGTAGGAGT |
| | SEQ ID NO: 384 |
| AGACAGAC | GCCTCCCTCGCGCCATCAGAGACAGACCATGCT |
| SEQ ID NO: 385 | GCCTCCCGTAGGAGT |
| | SEQ ID NO: 386 |
| AGACAGTG | GCCTCCCTCGCGCCATCAGAGACAGTGCATGCT |
| SEQ ID NO: 387 | GCCTCCCGTAGGAGT |
| | SEQ ID NO: 388 |
| AGACCACT | GCCTCCCTCGCGCCATCAGAGACCACTCATGCT |
| SEQ ID NO: 389 | GCCTCCCGTAGGAGT |
| | SEQ ID NO: 390 |
| AGACCAGA | GCCTCCCTCGCGCCATCAGAGACCAGACATGCT |
| SEQ ID NO: 391 | GCCTCCCGTAGGAGT |
| | SEQ ID NO: 392 |
| AGACCTCA | GCCTCCCTCGCGCCATCAGAGACCTCACATGCT |
| SEQ ID NO: 393 | GCCTCCCGTAGGAGT |
| | SEQ ID NO: 394 |
| AGACCTGT | GCCTCCCTCGCGCCATCAGAGACCTGTCATGCT |
| SEQ ID NO: 395 | GCCTCCCGTAGGAGT |
| | SEQ ID NO: 396 |
| AGACGACA | GCCTCCCTCGCGCCATCAGAGACGACACATGCT |
| SEQ ID NO: 397 | GCCTCCCGTAGGAGT |
| | SEQ ID NO: 398 |
| AGACGAGT | GCCTCCCTCGCGCCATCAGAGACGAGTCATGCT |
| SEQ ID NO: 399 | GCCTCCCGTAGGAGT |
| | SEQ ID NO: 400 |
| AGACGTCT | GCCTCCCTCGCGCCATCAGAGACGTCTCATGCT |
| SEQ ID NO: 401 | GCCTCCCGTAGGAGT |
| | SEQ ID NO: 402 |
| AGACGTGA | GCCTCCCTCGCGCCATCAGAGACGTGACATGCT |
| SEQ ID NO: 403 | GCCTCCCGTAGGAGT |
| | SEQ ID NO: 404 |
| AGACTCAC | GCCTCCCTCGCGCCATCAGAGACTCACCATGCT |
| SEQ ID NO: 405 | GCCTCCCGTAGGAGT |
| | SEQ ID NO: 406 |
| AGACTCTG | GCCTCCCTCGCGCCATCAGAGACTCTGCATGCT |
| SEQ ID NO: 407 | GCCTCCCGTAGGAGT |
| | SEQ ID NO: 408 |
| AGACTGAG | GCCTCCCTCGCGCCATCAGAGACTGAGCATGCT |
| SEQ ID NO: 409 | GCCTCCCGTAGGAGT |
| | SEQ ID NO: 410 |
| AGACTGTC | GCCTCCCTCGCGCCATCAGAGACTGTCCATGCT |
| SEQ ID NO: 411 | GCCTCCCGTAGGAGT |
| | SEQ ID NO: 412 |
| AGAGACAC | GCCTCCCTCGCGCCATCAGAGAGACACCATGCT |
| SEQ ID NO: 413 | GCCTCCCGTAGGAGT |
| | SEQ ID NO: 414 |
| AGAGACTG | GCCTCCCTCGCGCCATCAGAGAGACTGCATGCT |
| SEQ ID NO: 415 | GCCTCCCGTAGGAGT |
| | SEQ ID NO: 416 |
| AGAGAGAG | GCCTCCCTCGCGCCATCAGAGAGAGAGCATGCT |
| SEQ ID NO: 417 | GCCTCCCGTAGGAGT |
| | SEQ ID NO: 418 |
| AGAGAGTC | GCCTCCCTCGCGCCATCAGAGAGAGTCCATGCT |
| SEQ ID NO: 419 | GCCTCCCGTAGGAGT |
| | SEQ ID NO: 420 |
| AGAGCACA | GCCTCCCTCGCGCCATCAGAGAGCACACATGCT |
| SEQ ID NO: 421 | GCCTCCCGTAGGAGT |
| | SEQ ID NO: 422 |
| AGAGCAGT | GCCTCCCTCGCGCCATCAGAGAGCAGTCATGCT |
| SEQ ID NO: 423 | GCCTCCCGTAGGAGT |
| | SEQ ID NO: 424 |
| AGAGCTCT | GCCTCCCTCGCGCCATCAGAGAGCTCTCATGCT |
| SEQ ID NO: 425 | GCCTCCCGTAGGAGT |
| | SEQ ID NO: 426 |
| AGAGCTGA | GCCTCCCTCGCGCCATCAGAGAGCTGACATGCT |
| SEQ ID NO: 427 | GCCTCCCGTAGGAGT |
| | SEQ ID NO: 428 |
| AGAGGACT | GCCTCCCTCGCGCCATCAGAGAGGACTCATGCT |
| SEQ ID NO: 429 | GCCTCCCGTAGGAGT |
| | SEQ ID NO: 430 |
| AGAGGAGA | GCCTCCCTCGCGCCATCAGAGAGGAGACATGCT |
| SEQ ID NO: 431 | GCCTCCCGTAGGAGT |
| | SEQ ID NO: 432 |
| AGAGGTCA | GCCTCCCTCGCGCCATCAGAGAGGTCACATGCT |
| SEQ ID NO: 433 | GCCTCCCGTAGGAGT |
| | SEQ ID NO: 434 |
| AGAGGTGT | GCCTCCCTCGCGCCATCAGAGAGGTGTCATGCT |
| SEQ ID NO: 435 | GCCTCCCGTAGGAGT |
| | SEQ ID NO: 436 |
| AGAGTCAG | GCCTCCCTCGCGCCATCAGAGAGTCAGCATGCT |
| SEQ ID NO: 437 | GCCTCCCGTAGGAGT |
| | SEQ ID NO: 438 |
| AGAGTCTC | GCCTCCCTCGCGCCATCAGAGAGTCTCCATGCT |
| SEQ ID NO: 439 | GCCTCCCGTAGGAGT |
| | SEQ ID NO: 440 |
| AGAGTGAC | GCCTCCCTCGCGCCATCAGAGAGTGACCATGCT |
| SEQ ID NO: 441 | GCCTCCCGTAGGAGT |
| | SEQ ID NO: 442 |
| AGAGTGTG | GCCTCCCTCGCGCCATCAGAGAGTGTGCATGCT |
| SEQ ID NO: 443 | GCCTCCCGTAGGAGT |
| | SEQ ID NO: 444 |
| AGCAACCT | GCCTCCCTCGCGCCATCAGAGCAACCTCATGCT |
| SEQ ID NO: 445 | GCCTCCCGTAGGAGT |
| | SEQ ID NO: 446 |
| AGCAACGA | GCCTCCCTCGCGCCATCAGAGCAACGACATGCT |
| SEQ ID NO: 447 | GCCTCCCGTAGGAGT |
| | SEQ ID NO: 448 |
| AGCAAGCA | GCCTCCCTCGCGCCATCAGAGCAAGCACATGCT |
| SEQ ID NO: 449 | GCCTCCCGTAGGAGT |
| | SEQ ID NO: 450 |
| AGCAAGGT | GCCTCCCTCGCGCCATCAGAGCAAGGTCATGCT |
| SEQ ID NO: 451 | GCCTCCCGTAGGAGT |
| | SEQ ID NO: 452 |
| AGCACAAG | GCCTCCCTCGCGCCATCAGAGCACAAGCATGCT |
| SEQ ID NO: 453 | GCCTCCCGTAGGAGT |
| | SEQ ID NO: 454 |
| AGCACATC | GCCTCCCTCGCGCCATCAGAGCACATCCATGCT |
| SEQ ID NO: 455 | GCCTCCCGTAGGAGT |
| | SEQ ID NO: 456 |
| AGCACTAC | GCCTCCCTCGCGCCATCAGAGCACTACCATGCT |
| SEQ ID NO: 457 | GCCTCCCGTAGGAGT |
| | SEQ ID NO: 458 |
| AGCACTTG | GCCTCCCTCGCGCCATCAGAGCACTTGCATGCT |
| SEQ ID NO: 459 | GCCTCCCGTAGGAGT |
| | SEQ ID NO: 460 |
| AGCAGAAC | GCCTCCCTCGCGCCATCAGAGCAGAACCATGCT |
| SEQ ID NO: 461 | GCCTCCCGTAGGAGT |
| | SEQ ID NO: 462 |
| AGCAGATG | GCCTCCCTCGCGCCATCAGAGCAGATGCATGCT |
| SEQ ID NO: 463 | GCCTCCCGTAGGAGT |
| | SEQ ID NO: 464 |
| AGCAGTAG | GCCTCCCTCGCGCCATCAGAGCAGTAGCATGCT |
| SEQ ID NO: 465 | GCCTCCCGTAGGAGT |
| | SEQ ID NO: 466 |
| AGCAGTTC | GCCTCCCTCGCGCCATCAGAGCAGTTCCATGCT |
| SEQ ID NO: 467 | GCCTCCCGTAGGAGT |
| | SEQ ID NO: 468 |
| AGCATCCA | GCCTCCCTCGCGCCATCAGAGCATCCACATGCT |
| SEQ ID NO: 469 | GCCTCCCGTAGGAGT |
| | SEQ ID NO: 470 |
| AGCATCGT | GCCTCCCTCGCGCCATCAGAGCATCGTCATGCT |
| SEQ ID NO: 471 | GCCTCCCGTAGGAGT |
| | SEQ ID NO: 472 |
| AGCATGCT | GCCTCCCTCGCGCCATCAGAGCATGCTCATGCT |
| SEQ ID NO: 473 | GCCTCCCGTAGGAGT |
| | SEQ ID NO: 474 |
| AGCATGGA | GCCTCCCTCGCGCCATCAGAGCATGGACATGCT |
| SEQ ID NO: 475 | GCCTCCCGTAGGAGT |
| | SEQ ID NO: 476 |
| AGCTACCA | GCCTCCCTCGCGCCATCAGAGCTACCACATGCT |
| SEQ ID NO: 477 | GCCTCCCGTAGGAGT |
| | SEQ ID NO: 478 |
| AGCTACGT | GCCTCCCTCGCGCCATCAGAGCTACGTCATGCT |
| SEQ ID NO: 479 | GCCTCCCGTAGGAGT |
| | SEQ ID NO: 480 |
| AGCTAGCT | GCCTCCCTCGCGCCATCAGAGCTAGCTCATGCT |
| SEQ ID NO: 481 | GCCTCCCGTAGGAGT |
| | SEQ ID NO: 482 |
| AGCTAGGA | GCCTCCCTCGCGCCATCAGAGCTAGGACATGCT |
| SEQ ID NO: 483 | GCCTCCCGTAGGAGT |
| | SEQ ID NO: 484 |
| AGCTCAAC | GCCTCCCTCGCGCCATCAGAGCTCAACCATGCT |
| SEQ ID NO: 485 | GCCTCCCGTAGGAGT |
| | SEQ ID NO: 486 |
| AGCTCATG | GCCTCCCTCGCGCCATCAGAGCTCATGCATGCT |
| SEQ ID NO: 487 | GCCTCCCGTAGGAGT |
| | SEQ ID NO: 488 |
| AGCTCTAG | GCCTCCCTCGCGCCATCAGAGCTCTAGCATGCT |
| SEQ ID NO: 489 | GCCTCCCGTAGGAGT |
| | SEQ ID NO: 490 |
| AGCTCTTC | GCCTCCCTCGCGCCATCAGAGCTCTTCCATGCT |
| SEQ ID NO: 491 | GCCTCCCGTAGGAGT |
| | SEQ ID NO: 492 |
| AGCTGAAG | GCCTCCCTCGCGCCATCAGAGCTGAAGCATGCT |
| SEQ ID NO: 493 | GCCTCCCGTAGGAGT |
| | SEQ ID NO: 494 |
| AGCTGATC | GCCTCCCTCGCGCCATCAGAGCTGATCCATGCT |
| SEQ ID NO: 495 | GCCTCCCGTAGGAGT |
| | SEQ ID NO: 496 |
| AGCTGTAC | GCCTCCCTCGCGCCATCAGAGCTGTACCATGCT |
| SEQ ID NO: 497 | GCCTCCCGTAGGAGT |
| | SEQ ID NO: 498 |
| AGCTGTTG | GCCTCCCTCGCGCCATCAGAGCTGTTGCATGCT |
| SEQ ID NO: 499 | GCCTCCCGTAGGAGT |
| | SEQ ID NO: 500 |
| AGCTTCCT | GCCTCCCTCGCGCCATCAGAGCTTCCTCATGCT |
| SEQ ID NO: 501 | GCCTCCCGTAGGAGT |
| | SEQ ID NO: 502 |
| AGCTTCGA | GCCTCCCTCGCGCCATCAGAGCTTCGACATGCT |
| SEQ ID NO: 503 | GCCTCCCGTAGGAGT |
| | SEQ ID NO: 504 |
| AGCTTGCA | GCCTCCCTCGCGCCATCAGAGCTTGCACATGCT |
| SEQ ID NO: 505 | GCCTCCCGTAGGAGT |
| | SEQ ID NO: 506 |
| AGCTTGGT | GCCTCCCTCGCGCCATCAGAGCTTGGTCATGCT |
| SEQ ID NO: 507 | GCCTCCCGTAGGAGT |
| | SEQ ID NO: 508 |
| AGGAACCA | GCCTCCCTCGCGCCATCAGAGGAACCACATGCT |
| SEQ ID NO: 509 | GCCTCCCGTAGGAGT |
| | SEQ ID NO: 510 |
| AGGAACGT | GCCTCCCTCGCGCCATCAGAGGAACGTCATGCT |
| SEQ ID NO: 511 | GCCTCCCGTAGGAGT |
| | SEQ ID NO: 512 |
| AGGAAGCT | GCCTCCCTCGCGCCATCAGAGGAAGCTCATGCT |
| SEQ ID NO: 513 | GCCTCCCGTAGGAGT |
| | SEQ ID NO: 514 |
| AGGAAGGA | GCCTCCCTCGCGCCATCAGAGGAAGGACATGCT |
| SEQ ID NO: 515 | GCCTCCCGTAGGAGT |
| | SEQ ID NO: 516 |
| AGGACAAC | GCCTCCCTCGCGCCATCAGAGGACAACCATGCT |
| SEQ ID NO: 517 | GCCTCCCGTAGGAGT |
| | SEQ ID NO: 518 |
| AGGACATG | GCCTCCCTCGCGCCATCAGAGGACATGCATGCT |
| SEQ ID NO: 519 | GCCTCCCGTAGGAGT |
| | SEQ ID NO: 520 |
| AGGACTAG | GCCTCCCTCGCGCCATCAGAGGACTAGCATGCT |
| SEQ ID NO: 521 | GCCTCCCGTAGGAGT |
| | SEQ ID NO: 522 |
| AGGACTTC | GCCTCCCTCGCGCCATCAGAGGACTTCCATGCT |
| SEQ ID NO: 523 | GCCTCCCGTAGGAGT |
| | SEQ ID NO: 524 |
| AGGAGAAG | GCCTCCCTCGCGCCATCAGAGGAGAAGCATGCT |
| SEQ ID NO: 525 | GCCTCCCGTAGGAGT |
| | SEQ ID NO: 526 |
| AGGAGATC | GCCTCCCTCGCGCCATCAGAGGAGATCCATGCT |
| SEQ ID NO: 527 | GCCTCCCGTAGGAGT |
| | SEQ ID NO: 528 |
| AGGAGTAC | GCCTCCCTCGCGCCATCAGAGGAGTACCATGCT |
| SEQ ID NO: 529 | GCCTCCCGTAGGAGT |
| | SEQ ID NO: 530 |
| AGGAGTTG | GCCTCCCTCGCGCCATCAGAGGAGTTGCATGCT |
| SEQ ID NO: 531 | GCCTCCCGTAGGAGT |
| | SEQ ID NO: 532 |
| AGGATCCT | GCCTCCCTCGCGCCATCAGAGGATCCTCATGCT |
| SEQ ID NO: 533 | GCCTCCCGTAGGAGT |
| | SEQ ID NO: 534 |
| AGGATCGA | GCCTCCCTCGCGCCATCAGAGGATCGACATGCT |
| SEQ ID NO: 535 | GCCTCCCGTAGGAGT |
| | SEQ ID NO: 536 |
| AGGATGCA | GCCTCCCTCGCGCCATCAGAGGATGCACATGCT |
| SEQ ID NO: 537 | GCCTCCCGTAGGAGT |
| | SEQ ID NO: 538 |
| AGGATGGT | GCCTCCCTCGCGCCATCAGAGGATGGTCATGCT |
| SEQ ID NO: 539 | GCCTCCCGTAGGAGT |
| | SEQ ID NO: 540 |
| AGGTACCT | GCCTCCCTCGCGCCATCAGAGGTACCTCATGCT |
| SEQ ID NO: 541 | GCCTCCCGTAGGAGT |
| | SEQ ID NO: 542 |
| AGGTACGA | GCCTCCCTCGCGCCATCAGAGGTACGACATGCT |
| SEQ ID NO: 543 | GCCTCCCGTAGGAGT |
| | SEQ ID NO: 544 |
| AGGTAGCA | GCCTCCCTCGCGCCATCAGAGGTAGCACATGCT |
| SEQ ID NO: 545 | GCCTCCCGTAGGAGT |
| | SEQ ID NO: 546 |
| AGGTAGGT | GCCTCCCTCGCGCCATCAGAGGTAGGTCATGCT |
| SEQ ID NO: 547 | GCCTCCCGTAGGAGT |
| | SEQ ID NO: 548 |
| AGGTCAAG | GCCTCCCTCGCGCCATCAGAGGTCAAGCATGCT |
| SEQ ID NO: 549 | GCCTCCCGTAGGAGT |
| | SEQ ID NO: 550 |
| AGGTCATC | GCCTCCCTCGCGCCATCAGAGGTCATCCATGCT |
| SEQ ID NO: 551 | GCCTCCCGTAGGAGT |
| | SEQ ID NO: 552 |
| AGGTCTAC | GCCTCCCTCGCGCCATCAGAGGTCTACCATGCT |
| SEQ ID NO: 553 | GCCTCCCGTAGGAGT |
| | SEQ ID NO: 554 |
| AGGTCTTG | GCCTCCCTCGCGCCATCAGAGGTCTTGCATGCT |
| SEQ ID NO: 555 | GCCTCCCGTAGGAGT |
| | SEQ ID NO: 556 |
| AGGTGAAC | GCCTCCCTCGCGCCATCAGAGGTGAACCATGCT |
| SEQ ID NO: 557 | GCCTCCCGTAGGAGT |
| | SEQ ID NO: 558 |
| AGGTGATG | GCCTCCCTCGCGCCATCAGAGGTGATGCATGCT |
| SEQ ID NO: 559 | GCCTCCCGTAGGAGT |
| | SEQ ID NO: 560 |
| AGGTGTAG | GCCTCCCTCGCGCCATCAGAGGTGTAGCATGCT |
| SEQ ID NO: 561 | GCCTCCCGTAGGAGT |
| | SEQ ID NO: 562 |
| AGGTGTTC | GCCTCCCTCGCGCCATCAGAGGTGTTCCATGCT |
| SEQ ID NO: 563 | GCCTCCCGTAGGAGT |
| | SEQ ID NO: 564 |
| AGGTTCCA | GCCTCCCTCGCGCCATCAGAGGTTCCACATGCT |
| SEQ ID NO: 565 | GCCTCCCGTAGGAGT |
| | SEQ ID NO: 566 |
| AGGTTCGT | GCCTCCCTCGCGCCATCAGAGGTTCGTCATGCT |
| SEQ ID NO: 567 | GCCTCCCGTAGGAGT |
| | SEQ ID NO: 568 |
| AGGTTGCT | GCCTCCCTCGCGCCATCAGAGGTTGCTCATGCT |
| SEQ ID NO: 569 | GCCTCCCGTAGGAGT |
| | SEQ ID NO: 570 |
| AGGTTGGA | GCCTCCCTCGCGCCATCAGAGGTTGGACATGCT |
| SEQ ID NO: 571 | GCCTCCCGTAGGAGT |
| | SEQ ID NO: 572 |
| AGTCACAC | GCCTCCCTCGCGCCATCAGAGTCACACCATGCT |
| SEQ ID NO: 573 | GCCTCCCGTAGGAGT |
| | SEQ ID NO: 574 |
| AGTCACTG | GCCTCCCTCGCGCCATCAGAGTCACTGCATGCT |
| SEQ ID NO: 575 | GCCTCCCGTAGGAGT |
| | SEQ ID NO: 576 |
| AGTCAGAG | GCCTCCCTCGCGCCATCAGAGTCAGAGCATGCT |
| SEQ ID NO: 577 | GCCTCCCGTAGGAGT |
| | SEQ ID NO: 578 |
| AGTCAGTC | GCCTCCCTCGCGCCATCAGAGTCAGTCCATGCT |
| SEQ ID NO: 579 | GCCTCCCGTAGGAGT |
| | SEQ ID NO: 580 |
| AGTCCACA | GCCTCCCTCGCGCCATCAGAGTCCACACATGCT |
| SEQ ID NO: 581 | GCCTCCCGTAGGAGT |
| | SEQ ID NO: 582 |
| AGTCCAGT | GCCTCCCTCGCGCCATCAGAGTCCAGTCATGCT |
| SEQ ID NO: 583 | GCCTCCCGTAGGAGT |
| | SEQ ID NO: 584 |
| AGTCCTCT | GCCTCCCTCGCGCCATCAGAGTCCTCTCATGCT |
| SEQ ID NO: 585 | GCCTCCCGTAGGAGT |
| | SEQ ID NO: 586 |
| AGTCCTGA | GCCTCCCTCGCGCCATCAGAGTCCTGACATGCT |
| SEQ ID NO: 587 | GCCTCCCGTAGGAGT |
| | SEQ ID NO: 588 |
| AGTCGACT | GCCTCCCTCGCGCCATCAGAGTCGACTCATGCT |
| SEQ ID NO: 589 | GCCTCCCGTAGGAGT |
| | SEQ ID NO: 590 |
| AGTCGAGA | GCCTCCCTCGCGCCATCAGAGTCGAGACATGCT |
| SEQ ID NO: 591 | GCCTCCCGTAGGAGT |
| | SEQ ID NO: 592 |
| AGTCGTCA | GCCTCCCTCGCGCCATCAGAGTCGTCACATGCT |
| SEQ ID NO: 593 | GCCTCCCGTAGGAGT |
| | SEQ ID NO: 594 |
| AGTCGTGT | GCCTCCCTCGCGCCATCAGAGTCGTGTCATGCT |
| SEQ ID NO: 595 | GCCTCCCGTAGGAGT |
| | SEQ ID NO: 596 |
| AGTCTCAG | GCCTCCCTCGCGCCATCAGAGTCTCAGCATGCT |
| SEQ ID NO: 597 | GCCTCCCGTAGGAGT |
| | SEQ ID NO: 598 |
| AGTCTCTC | GCCTCCCTCGCGCCATCAGAGTCTCTCCATGCT |
| SEQ ID NO: 599 | GCCTCCCGTAGGAGT |
| | SEQ ID NO: 600 |
| AGTCTGAC | GCCTCCCTCGCGCCATCAGAGTCTGACCATGCT |
| SEQ ID NO: 601 | GCCTCCCGTAGGAGT |
| | SEQ ID NO: 602 |
| AGTCTGTG | GCCTCCCTCGCGCCATCAGAGTCTGTGCATGCT |
| SEQ ID NO: 603 | GCCTCCCGTAGGAGT |
| | SEQ ID NO: 604 |
| AGTGACAG | GCCTCCCTCGCGCCATCAGAGTGACAGCATGCT |
| SEQ ID NO: 605 | GCCTCCCGTAGGAGT |
| | SEQ ID NO: 606 |
| AGTGACTC | GCCTCCCTCGCGCCATCAGAGTGACTCCATGCT |
| SEQ ID NO: 607 | GCCTCCCGTAGGAGT |
| | SEQ ID NO: 608 |
| AGTGAGAC | GCCTCCCTCGCGCCATCAGAGTGAGACCATGCT |
| SEQ ID NO: 609 | GCCTCCCGTAGGAGT |
| | SEQ ID NO: 610 |
| AGTGAGTG | GCCTCCCTCGCGCCATCAGAGTGAGTGCATGCT |
| SEQ ID NO: 611 | GCCTCCCGTAGGAGT |
| | SEQ ID NO: 612 |
| AGTGCACT | GCCTCCCTCGCGCCATCAGAGTGCACTCATGCT |
| SEQ ID NO: 613 | GCCTCCCGTAGGAGT |
| | SEQ ID NO: 614 |
| AGTGCAGA | GCCTCCCTCGCGCCATCAGAGTGCAGACATGCT |
| SEQ ID NO: 615 | GCCTCCCGTAGGAGT |
| | SEQ ID NO: 616 |
| AGTGCTCA | GCCTCCCTCGCGCCATCAGAGTGCTCACATGCT |
| SEQ ID NO: 617 | GCCTCCCGTAGGAGT |
| | SEQ ID NO: 618 |
| AGTGCTGT | GCCTCCCTCGCGCCATCAGAGTGCTGTCATGCT |
| SEQ ID NO: 619 | GCCTCCCGTAGGAGT |
| | SEQ ID NO: 620 |
| AGTGGACA | GCCTCCCTCGCGCCATCAGAGTGGACACATGCT |
| SEQ ID NO: 621 | GCCTCCCGTAGGAGT |
| | SEQ ID NO: 622 |
| AGTGGAGT | GCCTCCCTCGCGCCATCAGAGTGGAGTCATGCT |
| SEQ ID NO: 623 | GCCTCCCGTAGGAGT |
| | SEQ ID NO: 624 |
| AGTGGTCT | GCCTCCCTCGCGCCATCAGAGTGGTCTCATGCT |
| SEQ ID NO: 625 | GCCTCCCGTAGGAGT |
| | SEQ ID NO: 626 |
| AGTGGTGA | GCCTCCCTCGCGCCATCAGAGTGGTGACATGCT |
| SEQ ID NO: 627 | GCCTCCCGTAGGAGT |
| | SEQ ID NO: 628 |
| AGTGTCAC | GCCTCCCTCGCGCCATCAGAGTGTCACCATGCT |
| SEQ ID NO: 629 | GCCTCCCGTAGGAGT |
| | SEQ ID NO: 630 |
| AGTGTCTG | GCCTCCCTCGCGCCATCAGAGTGTCTGCATGCT |
| SEQ ID NO: 631 | GCCTCCCGTAGGAGT |
| | SEQ ID NO: 632 |
| AGTGTGAG | GCCTCCCTCGCGCCATCAGAGTGTGAGCATGCT |
| SEQ ID NO: 633 | GCCTCCCGTAGGAGT |
| | SEQ ID NO: 634 |
| AGTGTGTC | GCCTCCCTCGCGCCATCAGAGTGTGTCCATGCT |
| SEQ ID NO: 635 | GCCTCCCGTAGGAGT |
| | SEQ ID NO: 636 |
| ATAACCGC | GCCTCCCTCGCGCCATCAGATAACCGCCATGCT |
| SEQ ID NO: 637 | GCCTCCCGTAGGAGT |
| | SEQ ID NO: 638 |
| ATAACGCC | GCCTCCCTCGCGCCATCAGATAACGCCCATGCT |
| SEQ ID NO: 639 | GCCTCCCGTAGGAGT |
| | SEQ ID NO: 640 |
| ATAAGCGG | GCCTCCCTCGCGCCATCAGATAAGCGGCATGCT |
| SEQ ID NO: 641 | GCCTCCCGTAGGAGT |
| | SEQ ID NO: 642 |
| ATAAGGCG | GCCTCCCTCGCGCCATCAGATAAGGCGCATGCT |
| SEQ ID NO: 643 | GCCTCCCGTAGGAGT |
| | SEQ ID NO: 644 |
| ATATCCGG | GCCTCCCTCGCGCCATCAGATATCCGGCATGCT |
| SEQ ID NO: 645 | GCCTCCCGTAGGAGT |
| | SEQ ID NO: 646 |
| ATATCGCG | GCCTCCCTCGCGCCATCAGATATCGCGCATGCT |
| SEQ ID NO: 647 | GCCTCCCGTAGGAGT |
| | SEQ ID NO: 648 |
| ATATCGGC | GCCTCCCTCGCGCCATCAGATATCGGCCATGCT |
| SEQ ID NO: 649 | GCCTCCCGTAGGAGT |
| | SEQ ID NO: 650 |
| ATATGCCG | GCCTCCCTCGCGCCATCAGATATGCCGCATGCT |
| SEQ ID NO: 651 | GCCTCCCGTAGGAGT |
| | SEQ ID NO: 652 |
| ATATGCGC | GCCTCCCTCGCGCCATCAGATATGCGCCATGCT |
| SEQ ID NO: 653 | GCCTCCCGTAGGAGT |
| | SEQ ID NO: 654 |
| ATATGGCC | GCCTCCCTCGCGCCATCAGATATGGCCCATGCT |
| SEQ ID NO: 655 | GCCTCCCGTAGGAGT |
| | SEQ ID NO: 656 |
| ATCCAACG | GCCTCCCTCGCGCCATCAGATCCAACGCATGCT |
| SEQ ID NO: 657 | GCCTCCCGTAGGAGT |
| | SEQ ID NO: 658 |
| ATCCAAGC | GCCTCCCTCGCGCCATCAGATCCAAGCCATGCT |
| SEQ ID NO: 659 | GCCTCCCGTAGGAGT |
| | SEQ ID NO: 660 |
| ATCCATCC | GCCTCCCTCGCGCCATCAGATCCATCCCATGCT |
| SEQ ID NO: 661 | GCCTCCCGTAGGAGT |
| | SEQ ID NO: 662 |
| ATCCATGG | GCCTCCCTCGCGCCATCAGATCCATGGCATGCT |
| SEQ ID NO: 663 | GCCTCCCGTAGGAGT |
| | SEQ ID NO: 664 |
| ATCCGCAA | GCCTCCCTCGCGCCATCAGATCCGCAACATGCT |
| SEQ ID NO: 665 | GCCTCCCGTAGGAGT |
| | SEQ ID NO: 666 |
| ATCCGCTT | GCCTCCCTCGCGCCATCAGATCCGCTTCATGCT |
| SEQ ID NO: 667 | GCCTCCCGTAGGAGT |
| | SEQ ID NO: 668 |
| ATCCGGAT | GCCTCCCTCGCGCCATCAGATCCGGATCATGCT |
| SEQ ID NO: 669 | GCCTCCCGTAGGAGT |
| | SEQ ID NO: 670 |
| ATCCGGTA | GCCTCCCTCGCGCCATCAGATCCGGTACATGCT |
| SEQ ID NO: 671 | GCCTCCCGTAGGAGT |
| | SEQ ID NO: 672 |
| ATCCTACC | GCCTCCCTCGCGCCATCAGATCCTACCCATGCT |
| SEQ ID NO: 673 | GCCTCCCGTAGGAGT |
| | SEQ ID NO: 674 |
| ATCCTAGG | GCCTCCCTCGCGCCATCAGATCCTAGGCATGCT |
| SEQ ID NO: 675 | GCCTCCCGTAGGAGT |
| | SEQ ID NO: 676 |
| ATCCTTCG | GCCTCCCTCGCGCCATCAGATCCTTCGCATGCT |
| SEQ ID NO: 677 | GCCTCCCGTAGGAGT |
| | SEQ ID NO: 678 |
| ATCCTTGC | GCCTCCCTCGCGCCATCAGATCCTTGCCATGCT |
| SEQ ID NO: 679 | GCCTCCCGTAGGAGT |
| | SEQ ID NO: 680 |
| ATCGAACC | GCCTCCCTCGCGCCATCAGATCGAACCCATGCT |
| SEQ ID NO: 681 | GCCTCCCGTAGGAGT |
| | SEQ ID NO: 682 |
| ATCGAAGG | GCCTCCCTCGCGCCATCAGATCGAAGGCATGCT |
| SEQ ID NO: 683 | GCCTCCCGTAGGAGT |
| | SEQ ID NO: 684 |
| ATCGATCG | GCCTCCCTCGCGCCATCAGATCGATCGCATGCT |
| SEQ ID NO: 685 | GCCTCCCGTAGGAGT |
| | SEQ ID NO: 686 |
| ATCGATGC | GCCTCCCTCGCGCCATCAGATCGATGCCATGCT |
| SEQ ID NO: 687 | GCCTCCCGTAGGAGT |
| | SEQ ID NO: 688 |
| ATCGCCAA | GCCTCCCTCGCGCCATCAGATCGCCAACATGCT |
| SEQ ID NO: 689 | GCCTCCCGTAGGAGT |
| | SEQ ID NO: 690 |
| ATCGCCTT | GCCTCCCTCGCGCCATCAGATCGCCTTCATGCT |
| SEQ ID NO: 691 | GCCTCCCGTAGGAGT |
| | SEQ ID NO: 692 |
| ATCGCGAT | GCCTCCCTCGCGCCATCAGATCGCGATCATGCT |
| SEQ ID NO: 693 | GCCTCCCGTAGGAGT |
| | SEQ ID NO: 694 |
| ATCGCGTA | GCCTCCCTCGCGCCATCAGATCGCGTACATGCT |
| SEQ ID NO: 695 | GCCTCCCGTAGGAGT |
| | SEQ ID NO: 696 |
| ATCGGCAT | GCCTCCCTCGCGCCATCAGATCGGCATCATGCT |
| SEQ ID NO: 697 | GCCTCCCGTAGGAGT |
| | SEQ ID NO: 698 |
| ATCGGCTA | GCCTCCCTCGCGCCATCAGATCGGCTACATGCT |
| SEQ ID NO: 699 | GCCTCCCGTAGGAGT |
| | SEQ ID NO: 700 |
| ATCGTACG | GCCTCCCTCGCGCCATCAGATCGTACGCATGCT |
| SEQ ID NO: 701 | GCCTCCCGTAGGAGT |
| | SEQ ID NO: 702 |
| ATCGTAGC | GCCTCCCTCGCGCCATCAGATCGTAGCCATGCT |
| SEQ ID NO: 703 | GCCTCCCGTAGGAGT |
| | SEQ ID NO: 704 |
| ATCGTTCC | GCCTCCCTCGCGCCATCAGATCGTTCCCATGCT |
| SEQ ID NO: 705 | GCCTCCCGTAGGAGT |
| | SEQ ID NO: 706 |
| ATCGTTGG | GCCTCCCTCGCGCCATCAGATCGTTGGCATGCT |
| SEQ ID NO: 707 | GCCTCCCGTAGGAGT |
| | SEQ ID NO: 708 |
| ATGCAACC | GCCTCCCTCGCGCCATCAGATGCAACCCATGCT |
| SEQ ID NO: 709 | GCCTCCCGTAGGAGT |
| | SEQ ID NO: 710 |
| ATGCAAGG | GCCTCCCTCGCGCCATCAGATGCAAGGCATGCT |
| SEQ ID NO: 711 | GCCTCCCGTAGGAGT |
| | SEQ ID NO: 712 |
| ATGCATCG | GCCTCCCTCGCGCCATCAGATGCATCGCATGCT |
| SEQ ID NO: 713 | GCCTCCCGTAGGAGT |
| | SEQ ID NO: 714 |
| ATGCATGC | GCCTCCCTCGCGCCATCAGATGCATGCCATGCT |
| SEQ ID NO: 715 | GCCTCCCGTAGGAGT |
| | SEQ ID NO: 716 |
| ATGCCGAT | GCCTCCCTCGCGCCATCAGATGCCGATCATGCT |
| SEQ ID NO: 717 | GCCTCCCGTAGGAGT |
| | SEQ ID NO: 718 |
| ATGCCGTA | GCCTCCCTCGCGCCATCAGATGCCGTACATGCT |
| SEQ ID NO: 719 | GCCTCCCGTAGGAGT |
| | SEQ ID NO: 720 |
| ATGCGCAT | GCCTCCCTCGCGCCATCAGATGCGCATCATGCT |
| SEQ ID NO: 721 | GCCTCCCGTAGGAGT |
| | SEQ ID NO: 722 |
| ATGCGCTA | GCCTCCCTCGCGCCATCAGATGCGCTACATGCT |
| SEQ ID NO: 723 | GCCTCCCGTAGGAGT |
| | SEQ ID NO: 724 |
| ATGCGGAA | GCCTCCCTCGCGCCATCAGATGCGGAACATGCT |
| SEQ ID NO: 725 | GCCTCCCGTAGGAGT |
| | SEQ ID NO: 726 |
| ATGCGGTT | GCCTCCCTCGCGCCATCAGATGCGGTTCATGCT |
| SEQ ID NO: 727 | GCCTCCCGTAGGAGT |
| | SEQ ID NO: 728 |
| ATGCTACG | GCCTCCCTCGCGCCATCAGATGCTACGCATGCT |
| SEQ ID NO: 729 | GCCTCCCGTAGGAGT |
| | SEQ ID NO: 730 |
| ATGCTAGC | GCCTCCCTCGCGCCATCAGATGCTAGCCATGCT |
| SEQ ID NO: 731 | GCCTCCCGTAGGAGT |
| | SEQ ID NO: 732 |
| ATGCTTCC | GCCTCCCTCGCGCCATCAGATGCTTCCCATGCT |
| SEQ ID NO: 733 | GCCTCCCGTAGGAGT |
| | SEQ ID NO: 734 |
| ATGCTTGG | GCCTCCCTCGCGCCATCAGATGCTTGGCATGCT |
| SEQ ID NO: 735 | GCCTCCCGTAGGAGT |
| | SEQ ID NO: 736 |
| ATGGAACG | GCCTCCCTCGCGCCATCAGATGGAACGCATGCT |
| SEQ ID NO: 737 | GCCTCCCGTAGGAGT |
| | SEQ ID NO: 738 |
| ATGGAAGC | GCCTCCCTCGCGCCATCAGATGGAAGCCATGCT |
| SEQ ID NO: 739 | GCCTCCCGTAGGAGT |
| | SEQ ID NO: 740 |
| ATGGATCC | GCCTCCCTCGCGCCATCAGATGGATCCCATGCT |
| SEQ ID NO: 741 | GCCTCCCGTAGGAGT |
| | SEQ ID NO: 742 |
| ATGGATGG | GCCTCCCTCGCGCCATCAGATGGATGGCATGCT |
| SEQ ID NO: 743 | GCCTCCCGTAGGAGT |
| | SEQ ID NO: 744 |
| ATGGCCAT | GCCTCCCTCGCGCCATCAGATGGCCATCATGCT |
| SEQ ID NO: 745 | GCCTCCCGTAGGAGT |
| | SEQ ID NO: 746 |
| ATGGCCTA | GCCTCCCTCGCGCCATCAGATGGCCTACATGCT |
| SEQ ID NO: 747 | GCCTCCCGTAGGAGT |
| | SEQ ID NO: 748 |
| ATGGCGAA | GCCTCCCTCGCGCCATCAGATGGCGAACATGCT |
| SEQ ID NO: 749 | GCCTCCCGTAGGAGT |
| | SEQ ID NO: 750 |
| ATGGCGTT | GCCTCCCTCGCGCCATCAGATGGCGTTCATGCT |
| SEQ ID NO: 751 | GCCTCCCGTAGGAGT |
| | SEQ ID NO: 752 |
| ATGGTACC | GCCTCCCTCGCGCCATCAGATGGTACCCATGCT |
| SEQ ID NO: 753 | GCCTCCCGTAGGAGT |
| | SEQ ID NO: 754 |
| ATGGTAGG | GCCTCCCTCGCGCCATCAGATGGTAGGCATGCT |
| SEQ ID NO: 755 | GCCTCCCGTAGGAGT |
| | SEQ ID NO: 756 |
| ATGGTTCG | GCCTCCCTCGCGCCATCAGATGGTTCGCATGCT |
| SEQ ID NO: 757 | GCCTCCCGTAGGAGT |
| | SEQ ID NO: 758 |
| ATGGTTGC | GCCTCCCTCGCGCCATCAGATGGTTGCCATGCT |
| SEQ ID NO: 759 | GCCTCCCGTAGGAGT |
| | SEQ ID NO: 760 |
| ATTACCGG | GCCTCCCTCGCGCCATCAGATTACCGGCATGCT |
| SEQ ID NO: 761 | GCCTCCCGTAGGAGT |
| | SEQ ID NO: 762 |
| ATTACGCG | GCCTCCCTCGCGCCATCAGATTACGCGCATGCT |
| SEQ ID NO: 763 | GCCTCCCGTAGGAGT |
| | SEQ ID NO: 764 |
| ATTACGGC | GCCTCCCTCGCGCCATCAGATTACGGCCATGCT |
| SEQ ID NO: 765 | GCCTCCCGTAGGAGT |
| | SEQ ID NO: 766 |
| ATTAGCCG | GCCTCCCTCGCGCCATCAGATTAGCCGCATGCT |
| SEQ ID NO: 767 | GCCTCCCGTAGGAGT |
| | SEQ ID NO: 768 |
| ATTAGCGC | GCCTCCCTCGCGCCATCAGATTAGCGCCATGCT |
| SEQ ID NO: 769 | GCCTCCCGTAGGAGT |
| | SEQ ID NO: 770 |
| ATTAGGCC | GCCTCCCTCGCGCCATCAGATTAGGCCCATGCT |
| SEQ ID NO: 771 | GCCTCCCGTAGGAGT |
| | SEQ ID NO: 772 |
| CAACACCA | GCCTCCCTCGCGCCATCAGCAACACCACATGCT |
| SEQ ID NO: 773 | GCCTCCCGTAGGAGT |
| | SEQ ID NO: 774 |
| CAACACGT | GCCTCCCTCGCGCCATCAGCAACACGTCATGCT |
| SEQ ID NO: 775 | GCCTCCCGTAGGAGT |
| | SEQ ID NO: 776 |
| CAACAGCT | GCCTCCCTCGCGCCATCAGCAACAGCTCATGCT |
| SEQ ID NO: 777 | GCCTCCCGTAGGAGT |
| | SEQ ID NO: 778 |
| CAACAGGA | GCCTCCCTCGCGCCATCAGCAACAGGACATGCT |
| SEQ ID NO: 779 | GCCTCCCGTAGGAGT |
| | SEQ ID NO: 780 |
| CAACCAAC | GCCTCCCTCGCGCCATCAGCAACCAACCATGCT |
| SEQ ID NO: 781 | GCCTCCCGTAGGAGT |
| | SEQ ID NO: 782 |
| CAACCATG | GCCTCCCTCGCGCCATCAGCAACCATGCATGCT |
| SEQ ID NO: 783 | GCCTCCCGTAGGAGT |
| | SEQ ID NO: 784 |
| CAACCTAG | GCCTCCCTCGCGCCATCAGCAACCTAGCATGCT |
| SEQ ID NO: 785 | GCCTCCCGTAGGAGT |
| | SEQ ID NO: 786 |
| CAACCTTC | GCCTCCCTCGCGCCATCAGCAACCTTCCATGCT |
| SEQ ID NO: 787 | GCCTCCCGTAGGAGT |
| | SEQ ID NO: 788 |
| CAACGAAG | GCCTCCCTCGCGCCATCAGCAACGAAGCATGCT |
| SEQ ID NO: 789 | GCCTCCCGTAGGAGT |
| | SEQ ID NO: 790 |
| CAACGATC | GCCTCCCTCGCGCCATCAGCAACGATCCATGCT |
| SEQ ID NO: 791 | GCCTCCCGTAGGAGT |
| | SEQ ID NO: 792 |
| CAACGTAC | GCCTCCCTCGCGCCATCAGCAACGTACCATGCT |
| SEQ ID NO: 793 | GCCTCCCGTAGGAGT |
| | SEQ ID NO: 794 |
| CAACGTTG | GCCTCCCTCGCGCCATCAGCAACGTTGCATGCT |
| SEQ ID NO: 795 | GCCTCCCGTAGGAGT |
| | SEQ ID NO: 796 |
| CAACTCCT | GCCTCCCTCGCGCCATCAGCAACTCCTCATGCT |
| SEQ ID NO: 797 | GCCTCCCGTAGGAGT |
| | SEQ ID NO: 798 |
| CAACTCGA | GCCTCCCTCGCGCCATCAGCAACTCGACATGCT |
| SEQ ID NO: 799 | GCCTCCCGTAGGAGT |
| | SEQ ID NO: 800 |
| CAACTGCA | GCCTCCCTCGCGCCATCAGCAACTGCACATGCT |
| SEQ ID NO: 801 | GCCTCCCGTAGGAGT |
| | SEQ ID NO: 802 |
| CAACTGGT | GCCTCCCTCGCGCCATCAGCAACTGGTCATGCT |
| SEQ ID NO: 803 | GCCTCCCGTAGGAGT |
| | SEQ ID NO: 804 |
| CAAGACCT | GCCTCCCTCGCGCCATCAGCAAGACCTCATGCT |
| SEQ ID NO: 805 | GCCTCCCGTAGGAGT |
| | SEQ ID NO: 806 |
| CAAGACGA | GCCTCCCTCGCGCCATCAGCAAGACGACATGCT |
| SEQ ID NO: 807 | GCCTCCCGTAGGAGT |
| | SEQ ID NO: 808 |
| CAAGAGCA | GCCTCCCTCGCGCCATCAGCAAGAGCACATGCT |
| SEQ ID NO: 809 | GCCTCCCGTAGGAGT |
| | SEQ ID NO: 810 |
| CAAGAGGT | GCCTCCCTCGCGCCATCAGCAAGAGGTCATGCT |
| SEQ ID NO: 811 | GCCTCCCGTAGGAGT |
| | SEQ ID NO: 812 |
| CAAGCAAG | GCCTCCCTCGCGCCATCAGCAAGCAAGCATGCT |
| SEQ ID NO: 813 | GCCTCCCGTAGGAGT |
| | SEQ ID NO: 814 |
| CAAGCATC | GCCTCCCTCGCGCCATCAGCAAGCATCCATGCT |
| SEQ ID NO: 815 | GCCTCCCGTAGGAGT |
| | SEQ ID NO: 816 |
| CAAGCTAC | GCCTCCCTCGCGCCATCAGCAAGCTACCATGCT |
| SEQ ID NO: 817 | GCCTCCCGTAGGAGT |
| | SEQ ID NO: 818 |
| CAAGCTTG | GCCTCCCTCGCGCCATCAGCAAGCTTGCATGCT |
| SEQ ID NO: 819 | GCCTCCCGTAGGAGT |
| | SEQ ID NO: 820 |
| CAAGGAAC | GCCTCCCTCGCGCCATCAGCAAGGAACCATGCT |
| SEQ ID NO: 821 | GCCTCCCGTAGGAGT |
| | SEQ ID NO: 822 |
| CAAGGATG | GCCTCCCTCGCGCCATCAGCAAGGATGCATGCT |
| SEQ ID NO: 823 | GCCTCCCGTAGGAGT |
| | SEQ ID NO: 824 |
| CAAGGTAG | GCCTCCCTCGCGCCATCAGCAAGGTAGCATGCT |
| SEQ ID NO: 825 | GCCTCCCGTAGGAGT |
| | SEQ ID NO: 826 |
| CAAGGTTC | GCCTCCCTCGCGCCATCAGCAAGGTTCCATGCT |
| SEQ ID NO: 827 | GCCTCCCGTAGGAGT |
| | SEQ ID NO: 828 |
| CAAGTCCA | GCCTCCCTCGCGCCATCAGCAAGTCCACATGCT |
| SEQ ID NO: 829 | GCCTCCCGTAGGAGT |
| | SEQ ID NO: 830 |
| CAAGTCGT | GCCTCCCTCGCGCCATCAGCAAGTCGTCATGCT |
| SEQ ID NO: 831 | GCCTCCCGTAGGAGT |
| | SEQ ID NO: 832 |
| CAAGTGCT | GCCTCCCTCGCGCCATCAGCAAGTGCTCATGCT |
| SEQ ID NO: 833 | GCCTCCCGTAGGAGT |
| | SEQ ID NO: 834 |
| CAAGTGGA | GCCTCCCTCGCGCCATCAGCAAGTGGACATGCT |
| SEQ ID NO: 835 | GCCTCCCGTAGGAGT |
| | SEQ ID NO: 836 |
| CACAACAC | GCCTCCCTCGCGCCATCAGCACAACACCATGCT |
| SEQ ID NO: 837 | GCCTCCCGTAGGAGT |
| | SEQ ID NO: 838 |
| CACAACTG | GCCTCCCTCGCGCCATCAGCACAACTGCATGCT |
| SEQ ID NO: 839 | GCCTCCCGTAGGAGT |
| | SEQ ID NO: 840 |
| CACAAGAG | GCCTCCCTCGCGCCATCAGCACAAGAGCATGCT |
| SEQ ID NO: 841 | GCCTCCCGTAGGAGT |
| | SEQ ID NO: 842 |
| CACAAGTC | GCCTCCCTCGCGCCATCAGCACAAGTCCATGCT |
| SEQ ID NO: 843 | GCCTCCCGTAGGAGT |
| | SEQ ID NO: 844 |
| CACACACA | GCCTCCCTCGCGCCATCAGCACACACACATGCT |
| SEQ ID NO: 845 | GCCTCCCGTAGGAGT |
| | SEQ ID NO: 846 |
| CACACAGT | GCCTCCCTCGCGCCATCAGCACACAGTCATGCT |
| SEQ ID NO: 847 | GCCTCCCGTAGGAGT |
| | SEQ ID NO: 848 |
| CACACTCT | GCCTCCCTCGCGCCATCAGCACACTCTCATGCT |
| SEQ ID NO: 849 | GCCTCCCGTAGGAGT |
| | SEQ ID NO: 850 |
| CACACTGA | GCCTCCCTCGCGCCATCAGCACACTGACATGCT |
| SEQ ID NO: 851 | GCCTCCCGTAGGAGT |
| | SEQ ID NO: 852 |
| CACAGACT | GCCTCCCTCGCGCCATCAGCACAGACTCATGCT |
| SEQ ID NO: 853 | GCCTCCCGTAGGAGT |
| | SEQ ID NO: 854 |
| CACAGAGA | GCCTCCCTCGCGCCATCAGCACAGAGACATGCT |
| SEQ ID NO: 855 | GCCTCCCGTAGGAGT |
| | SEQ ID NO: 856 |
| CACAGTCA | GCCTCCCTCGCGCCATCAGCACAGTCACATGCT |
| SEQ ID NO: 857 | GCCTCCCGTAGGAGT |
| | SEQ ID NO: 858 |
| CACAGTGT | GCCTCCCTCGCGCCATCAGCACAGTGTCATGCT |
| SEQ ID NO: 859 | GCCTCCCGTAGGAGT |
| | SEQ ID NO: 860 |
| CACATCAG | GCCTCCCTCGCGCCATCAGCACATCAGCATGCT |
| SEQ ID NO: 861 | GCCTCCCGTAGGAGT |
| | SEQ ID NO: 862 |
| CACATCTC | GCCTCCCTCGCGCCATCAGCACATCTCCATGCT |
| SEQ ID NO: 863 | GCCTCCCGTAGGAGT |
| | SEQ ID NO: 864 |
| CACATGAC | GCCTCCCTCGCGCCATCAGCACATGACCATGCT |
| SEQ ID NO: 865 | GCCTCCCGTAGGAGT |
| | SEQ ID NO: 866 |
| CACATGTG | GCCTCCCTCGCGCCATCAGCACATGTGCATGCT |
| SEQ ID NO: 867 | GCCTCCCGTAGGAGT |
| | SEQ ID NO: 868 |
| CACTACAG | GCCTCCCTCGCGCCATCAGCACTACAGCATGCT |
| SEQ ID NO: 869 | GCCTCCCGTAGGAGT |
| | SEQ ID NO: 870 |
| CACTACTC | GCCTCCCTCGCGCCATCAGCACTACTCCATGCT |
| SEQ ID NO: 871 | GCCTCCCGTAGGAGT |
| | SEQ ID NO: 872 |
| CACTAGAC | GCCTCCCTCGCGCCATCAGCACTAGACCATGCT |
| SEQ ID NO: 873 | GCCTCCCGTAGGAGT |
| | SEQ ID NO: 874 |
| CACTAGTG | GCCTCCCTCGCGCCATCAGCACTAGTGCATGCT |
| SEQ ID NO: 875 | GCCTCCCGTAGGAGT |
| | SEQ ID NO: 876 |
| CACTCACT | GCCTCCCTCGCGCCATCAGCACTCACTCATGCT |
| SEQ ID NO: 877 | GCCTCCCGTAGGAGT |
| | SEQ ID NO: 878 |
| CACTCAGA | GCCTCCCTCGCGCCATCAGCACTCAGACATGCT |
| SEQ ID NO: 879 | GCCTCCCGTAGGAGT |
| | SEQ ID NO: 880 |
| CACTCTCA | GCCTCCCTCGCGCCATCAGCACTCTCACATGCT |
| SEQ ID NO: 881 | GCCTCCCGTAGGAGT |
| | SEQ ID NO: 882 |
| CACTCTGT | GCCTCCCTCGCGCCATCAGCACTCTGTCATGCT |
| SEQ ID NO: 883 | GCCTCCCGTAGGAGT |
| | SEQ ID NO: 884 |
| CACTGACA | GCCTCCCTCGCGCCATCAGCACTGACACATGCT |
| SEQ ID NO: 885 | GCCTCCCGTAGGAGT |
| | SEQ ID NO: 886 |
| CACTGAGT | GCCTCCCTCGCGCCATCAGCACTGAGTCATGCT |
| SEQ ID NO: 887 | GCCTCCCGTAGGAGT |
| | SEQ ID NO: 888 |
| CACTGTCT | GCCTCCCTCGCGCCATCAGCACTGTCTCATGCT |
| SEQ ID NO: 889 | GCCTCCCGTAGGAGT |
| | SEQ ID NO: 890 |
| CACTGTGA | GCCTCCCTCGCGCCATCAGCACTGTGACATGCT |
| SEQ ID NO: 891 | GCCTCCCGTAGGAGT |
| | SEQ ID NO: 892 |
| CACTTCAC | GCCTCCCTCGCGCCATCAGCACTTCACCATGCT |
| SEQ ID NO: 893 | GCCTCCCGTAGGAGT |
| | SEQ ID NO: 894 |
| CACTTCTG | GCCTCCCTCGCGCCATCAGCACTTCTGCATGCT |
| SEQ ID NO: 895 | GCCTCCCGTAGGAGT |
| | SEQ ID NO: 896 |
| CACTTGAG | GCCTCCCTCGCGCCATCAGCACTTGAGCATGCT |
| SEQ ID NO: 897 | GCCTCCCGTAGGAGT |
| | SEQ ID NO: 898 |
| CACTTGTC | GCCTCCCTCGCGCCATCAGCACTTGTCCATGCT |
| SEQ ID NO: 899 | GCCTCCCGTAGGAGT |
| | SEQ ID NO: 900 |
| CAGAACAG | GCCTCCCTCGCGCCATCAGCAGAACAGCATGCT |
| SEQ ID NO: 901 | GCCTCCCGTAGGAGT |
| | SEQ ID NO: 902 |
| CAGAACTC | GCCTCCCTCGCGCCATCAGCAGAACTCCATGCT |
| SEQ ID NO: 903 | GCCTCCCGTAGGAGT |
| | SEQ ID NO: 904 |
| CAGAAGAC | GCCTCCCTCGCGCCATCAGCAGAAGACCATGCT |
| SEQ ID NO: 905 | GCCTCCCGTAGGAGT |
| | SEQ ID NO: 906 |
| CAGAAGTG | GCCTCCCTCGCGCCATCAGCAGAAGTGCATGCT |
| SEQ ID NO: 907 | GCCTCCCGTAGGAGT |
| | SEQ ID NO: 908 |
| CAGACACT | GCCTCCCTCGCGCCATCAGCAGACACTCATGCT |
| SEQ ID NO: 909 | GCCTCCCGTAGGAGT |
| | SEQ ID NO: 910 |
| CAGACAGA | GCCTCCCTCGCGCCATCAGCAGACAGACATGCT |
| SEQ ID NO: 911 | GCCTCCCGTAGGAGT |
| | SEQ ID NO: 912 |
| CAGACTCA | GCCTCCCTCGCGCCATCAGCAGACTCACATGCT |
| SEQ ID NO: 913 | GCCTCCCGTAGGAGT |
| | SEQ ID NO: 914 |
| CAGACTGT | GCCTCCCTCGCGCCATCAGCAGACTGTCATGCT |
| SEQ ID NO: 915 | GCCTCCCGTAGGAGT |
| | SEQ ID NO: 916 |
| CAGAGACA | GCCTCCCTCGCGCCATCAGCAGAGACACATGCT |
| SEQ ID NO: 917 | GCCTCCCGTAGGAGT |
| | SEQ ID NO: 918 |
| CAGAGAGT | GCCTCCCTCGCGCCATCAGCAGAGAGTCATGCT |
| SEQ ID NO: 919 | GCCTCCCGTAGGAGT |
| | SEQ ID NO: 920 |
| CAGAGTCT | GCCTCCCTCGCGCCATCAGCAGAGTCTCATGCT |
| SEQ ID NO: 921 | GCCTCCCGTAGGAGT |
| | SEQ ID NO: 922 |
| CAGAGTGA | GCCTCCCTCGCGCCATCAGCAGAGTGACATGCT |
| SEQ ID NO: 923 | GCCTCCCGTAGGAGT |
| | SEQ ID NO: 924 |
| CAGATCAC | GCCTCCCTCGCGCCATCAGCAGATCACCATGCT |
| SEQ ID NO: 925 | GCCTCCCGTAGGAGT |
| | SEQ ID NO: 926 |
| CAGATCTG | GCCTCCCTCGCGCCATCAGCAGATCTGCATGCT |
| SEQ ID NO: 927 | GCCTCCCGTAGGAGT |
| | SEQ ID NO: 928 |
| CAGATGAG | GCCTCCCTCGCGCCATCAGCAGATGAGCATGCT |
| SEQ ID NO: 929 | GCCTCCCGTAGGAGT |
| | SEQ ID NO: 930 |
| CAGATGTC | GCCTCCCTCGCGCCATCAGCAGATGTCCATGCT |
| SEQ ID NO: 931 | GCCTCCCGTAGGAGT |
| | SEQ ID NO: 932 |
| CAGTACAC | GCCTCCCTCGCGCCATCAGCAGTACACCATGCT |
| SEQ ID NO: 933 | GCCTCCCGTAGGAGT |
| | SEQ ID NO: 934 |
| CAGTACTG | GCCTCCCTCGCGCCATCAGCAGTACTGCATGCT |
| SEQ ID NO: 935 | GCCTCCCGTAGGAGT |
| | SEQ ID NO: 936 |
| CAGTAGAG | GCCTCCCTCGCGCCATCAGCAGTAGAGCATGCT |
| SEQ ID NO: 937 | GCCTCCCGTAGGAGT |
| | SEQ ID NO: 938 |
| CAGTAGTC | GCCTCCCTCGCGCCATCAGCAGTAGTCCATGCT |
| SEQ ID NO: 939 | GCCTCCCGTAGGAGT |
| | SEQ ID NO: 940 |
| CAGTCACA | GCCTCCCTCGCGCCATCAGCAGTCACACATGCT |
| SEQ ID NO: 941 | GCCTCCCGTAGGAGT |
| | SEQ ID NO: 942 |
| CAGTCAGT | GCCTCCCTCGCGCCATCAGCAGTCAGTCATGCT |
| SEQ ID NO: 943 | GCCTCCCGTAGGAGT |
| | SEQ ID NO: 944 |
| CAGTCTCT | GCCTCCCTCGCGCCATCAGCAGTCTCTCATGCT |
| SEQ ID NO: 945 | GCCTCCCGTAGGAGT |
| | SEQ ID NO: 946 |
| CAGTCTGA | GCCTCCCTCGCGCCATCAGCAGTCTGACATGCT |
| SEQ ID NO: 947 | GCCTCCCGTAGGAGT |
| | SEQ ID NO: 948 |
| CAGTGACT | GCCTCCCTCGCGCCATCAGCAGTGACTCATGCT |
| SEQ ID NO: 949 | GCCTCCCGTAGGAGT |
| | SEQ ID NO: 950 |
| CAGTGAGA | GCCTCCCTCGCGCCATCAGCAGTGAGACATGCT |
| SEQ ID NO: 951 | GCCTCCCGTAGGAGT |
| | SEQ ID NO: 952 |
| CAGTGTCA | GCCTCCCTCGCGCCATCAGCAGTGTCACATGCT |
| SEQ ID NO: 953 | GCCTCCCGTAGGAGT |
| | SEQ ID NO: 954 |
| CAGTGTGT | GCCTCCCTCGCGCCATCAGCAGTGTGTCATGCT |
| SEQ ID NO: 955 | GCCTCCCGTAGGAGT |
| | SEQ ID NO: 956 |
| CAGTTCAG | GCCTCCCTCGCGCCATCAGCAGTTCAGCATGCT |
| SEQ ID NO: 957 | GCCTCCCGTAGGAGT |
| | SEQ ID NO: 958 |
| CAGTTCTC | GCCTCCCTCGCGCCATCAGCAGTTCTCCATGCT |
| SEQ ID NO: 959 | GCCTCCCGTAGGAGT |
| | SEQ ID NO: 960 |
| CAGTTGAC | GCCTCCCTCGCGCCATCAGCAGTTGACCATGCT |
| SEQ ID NO: 961 | GCCTCCCGTAGGAGT |
| | SEQ ID NO: 962 |
| CAGTTGTG | GCCTCCCTCGCGCCATCAGCAGTTGTGCATGCT |
| SEQ ID NO: 963 | GCCTCCCGTAGGAGT |
| | SEQ ID NO: 964 |
| CATCACCT | GCCTCCCTCGCGCCATCAGCATCACCTCATGCT |
| SEQ ID NO: 965 | GCCTCCCGTAGGAGT |
| | SEQ ID NO: 966 |
| CATCACGA | GCCTCCCTCGCGCCATCAGCATCACGACATGCT |
| SEQ ID NO: 967 | GCCTCCCGTAGGAGT |
| | SEQ ID NO: 968 |
| CATCAGCA | GCCTCCCTCGCGCCATCAGCATCAGCACATGCT |
| SEQ ID NO: 969 | GCCTCCCGTAGGAGT |
| | SEQ ID NO: 970 |
| CATCAGGT | GCCTCCCTCGCGCCATCAGCATCAGGTCATGCT |
| SEQ ID NO: 971 | GCCTCCCGTAGGAGT |
| | SEQ ID NO: 972 |
| CATCCAAG | GCCTCCCTCGCGCCATCAGCATCCAAGCATGCT |
| SEQ ID NO: 973 | GCCTCCCGTAGGAGT |
| | SEQ ID NO: 974 |
| CATCCATC | GCCTCCCTCGCGCCATCAGCATCCATCCATGCT |
| SEQ ID NO: 975 | GCCTCCCGTAGGAGT |
| | SEQ ID NO: 976 |
| CATCCTAC | GCCTCCCTCGCGCCATCAGCATCCTACCATGCT |
| SEQ ID NO: 977 | GCCTCCCGTAGGAGT |
| | SEQ ID NO: 978 |
| CATCCTTG | GCCTCCCTCGCGCCATCAGCATCCTTGCATGCT |
| SEQ ID NO: 979 | GCCTCCCGTAGGAGT |
| | SEQ ID NO: 980 |
| CATCGAAC | GCCTCCCTCGCGCCATCAGCATCGAACCATGCT |
| SEQ ID NO: 981 | GCCTCCCGTAGGAGT |
| | SEQ ID NO: 982 |
| CATCGATG | GCCTCCCTCGCGCCATCAGCATCGATGCATGCT |
| SEQ ID NO: 983 | GCCTCCCGTAGGAGT |
| | SEQ ID NO: 984 |
| CATCGTAG | GCCTCCCTCGCGCCATCAGCATCGTAGCATGCT |
| SEQ ID NO: 985 | GCCTCCCGTAGGAGT |
| | SEQ ID NO: 986 |
| CATCGTTC | GCCTCCCTCGCGCCATCAGCATCGTTCCATGCT |
| SEQ ID NO: 987 | GCCTCCCGTAGGAGT |
| | SEQ ID NO: 988 |
| CATCTCCA | GCCTCCCTCGCGCCATCAGCATCTCCACATGCT |
| SEQ ID NO: 989 | GCCTCCCGTAGGAGT |
| | SEQ ID NO: 990 |
| CATCTCGT | GCCTCCCTCGCGCCATCAGCATCTCGTCATGCT |
| SEQ ID NO: 991 | GCCTCCCGTAGGAGT |
| | SEQ ID NO: 992 |
| CATCTGCT | GCCTCCCTCGCGCCATCAGCATCTGCTCATGCT |
| SEQ ID NO: 993 | GCCTCCCGTAGGAGT |
| | SEQ ID NO: 994 |
| CATCTGGA | GCCTCCCTCGCGCCATCAGCATCTGGACATGCT |
| SEQ ID NO: 995 | GCCTCCCGTAGGAGT |
| | SEQ ID NO: 996 |
| CATGACCA | GCCTCCCTCGCGCCATCAGCATGACCACATGCT |
| SEQ ID NO: 997 | GCCTCCCGTAGGAGT |
| | SEQ ID NO: 998 |
| CATGACGT | GCCTCCCTCGCGCCATCAGCATGACGTCATGCT |
| SEQ ID NO: 999 | GCCTCCCGTAGGAGT |
| | SEQ ID NO: 1000 |
| CATGAGCT | GCCTCCCTCGCGCCATCAGCATGAGCTCATGCT |
| SEQ ID NO: 1001 | GCCTCCCGTAGGAGT |
| | SEQ ID NO: 1002 |
| CATGAGGA | GCCTCCCTCGCGCCATCAGCATGAGGACATGCT |
| SEQ ID NO: 1003 | GCCTCCCGTAGGAGT |
| | SEQ ID NO: 1004 |
| CATGCAAC | GCCTCCCTCGCGCCATCAGCATGCAACCATGCT |
| SEQ ID NO: 1005 | GCCTCCCGTAGGAGT |
| | SEQ ID NO: 1006 |
| CATGCATG | GCCTCCCTCGCGCCATCAGCATGCATGCATGCT |
| SEQ ID NO: 1007 | GCCTCCCGTAGGAGT |
| | SEQ ID NO: 1008 |
| CATGCTAG | GCCTCCCTCGCGCCATCAGCATGCTAGCATGCT |
| SEQ ID NO: 1009 | GCCTCCCGTAGGAGT |
| | SEQ ID NO: 1010 |
| CATGCTTC | GCCTCCCTCGCGCCATCAGCATGCTTCCATGCT |
| SEQ ID NO: 1011 | GCCTCCCGTAGGAGT |
| | SEQ ID NO: 1012 |
| CATGGAAG | GCCTCCCTCGCGCCATCAGCATGGAAGCATGCT |
| SEQ ID NO: 1013 | GCCTCCCGTAGGAGT |
| | SEQ ID NO: 1014 |
| CATGGATC | GCCTCCCTCGCGCCATCAGCATGGATCCATGCT |
| SEQ ID NO: 1015 | GCCTCCCGTAGGAGT |
| | SEQ ID NO: 1016 |
| CATGGTAC | GCCTCCCTCGCGCCATCAGCATGGTACCATGCT |
| SEQ ID NO: 1017 | GCCTCCCGTAGGAGT |
| | SEQ ID NO: 1018 |
| CATGGTTG | GCCTCCCTCGCGCCATCAGCATGGTTGCATGCT |
| SEQ ID NO: 1019 | GCCTCCCGTAGGAGT |
| | SEQ ID NO: 1020 |
| CATGTCCT | GCCTCCCTCGCGCCATCAGCATGTCCTCATGCT |
| SEQ ID NO: 1021 | GCCTCCCGTAGGAGT |
| | SEQ ID NO: 1022 |
| CATGTCGA | GCCTCCCTCGCGCCATCAGCATGTCGACATGCT |
| SEQ ID NO: 1023 | GCCTCCCGTAGGAGT |
| | SEQ ID NO: 1024 |
| CATGTGCA | GCCTCCCTCGCGCCATCAGCATGTGCACATGCT |
| SEQ ID NO: 1025 | GCCTCCCGTAGGAGT |
| | SEQ ID NO: 1026 |
| CATGTGGT | GCCTCCCTCGCGCCATCAGCATGTGGTCATGCT |
| SEQ ID NO: 1027 | GCCTCCCGTAGGAGT |
| | SEQ ID NO: 1028 |
| CCAACCAA | GCCTCCCTCGCGCCATCAGCCAACCAACATGCT |
| SEQ ID NO: 1029 | GCCTCCCGTAGGAGT |
| | SEQ ID NO: 1030 |
| CCAACCTT | GCCTCCCTCGCGCCATCAGCCAACCTTCATGCT |
| SEQ ID NO: 1031 | GCCTCCCGTAGGAGT |
| | SEQ ID NO: 1032 |
| CCAACGAT | GCCTCCCTCGCGCCATCAGCCAACGATCATGCT |
| SEQ ID NO: 1033 | GCCTCCCGTAGGAGT |
| | SEQ ID NO: 1034 |
| CCAACGTA | GCCTCCCTCGCGCCATCAGCCAACGTACATGCT |
| SEQ ID NO: 1035 | GCCTCCCGTAGGAGT |
| | SEQ ID NO: 1036 |
| CCAAGCAT | GCCTCCCTCGCGCCATCAGCCAAGCATCATGCT |
| SEQ ID NO: 1037 | GCCTCCCGTAGGAGT |
| | SEQ ID NO: 1038 |
| CCAAGCTA | GCCTCCCTCGCGCCATCAGCCAAGCTACATGCT |
| SEQ ID NO: 1039 | GCCTCCCGTAGGAGT |
| | SEQ ID NO: 1040 |
| CCAAGGAA | GCCTCCCTCGCGCCATCAGCCAAGGAACATGCT |
| SEQ ID NO: 1041 | GCCTCCCGTAGGAGT |
| | SEQ ID NO: 1042 |
| CCAAGGTT | GCCTCCCTCGCGCCATCAGCCAAGGTTCATGCT |
| SEQ ID NO: 1043 | GCCTCCCGTAGGAGT |
| | SEQ ID NO: 1044 |
| CCAATACG | GCCTCCCTCGCGCCATCAGCCAATACGCATGCT |
| SEQ ID NO: 1045 | GCCTCCCGTAGGAGT |
| | SEQ ID NO: 1046 |
| CCAATAGC | GCCTCCCTCGCGCCATCAGCCAATAGCCATGCT |
| SEQ ID NO: 1047 | GCCTCCCGTAGGAGT |
| | SEQ ID NO: 1048 |
| CCAATTCC | GCCTCCCTCGCGCCATCAGCCAATTCCCATGCT |
| SEQ ID NO: 1049 | GCCTCCCGTAGGAGT |
| | SEQ ID NO: 1050 |
| CCAATTGG | GCCTCCCTCGCGCCATCAGCCAATTGGCATGCT |
| SEQ ID NO: 1051 | GCCTCCCGTAGGAGT |
| | SEQ ID NO: 1052 |
| CCATAACG | GCCTCCCTCGCGCCATCAGCCATAACGCATGCT |
| SEQ ID NO: 1053 | GCCTCCCGTAGGAGT |
| | SEQ ID NO: 1054 |
| CCATAAGC | GCCTCCCTCGCGCCATCAGCCATAAGCCATGCT |
| SEQ ID NO: 1055 | GCCTCCCGTAGGAGT |
| | SEQ ID NO: 1056 |
| CCATATCC | GCCTCCCTCGCGCCATCAGCCATATCCCATGCT |
| SEQ ID NO: 1057 | GCCTCCCGTAGGAGT |
| | SEQ ID NO: 1058 |
| CCATATGG | GCCTCCCTCGCGCCATCAGCCATATGGCATGCT |
| SEQ ID NO: 1059 | GCCTCCCGTAGGAGT |
| | SEQ ID NO: 1060 |
| CCATCCAT | GCCTCCCTCGCGCCATCAGCCATCCATCATGCT |
| SEQ ID NO: 1061 | GCCTCCCGTAGGAGT |
| | SEQ ID NO: 1062 |
| CCATCCTA | GCCTCCCTCGCGCCATCAGCCATCCTACATGCT |
| SEQ ID NO: 1063 | GCCTCCCGTAGGAGT |
| | SEQ ID NO: 1064 |
| CCATCGAA | GCCTCCCTCGCGCCATCAGCCATCGAACATGCT |
| SEQ ID NO: 1065 | GCCTCCCGTAGGAGT |
| | SEQ ID NO: 1066 |
| CCATCGTT | GCCTCCCTCGCGCCATCAGCCATCGTTCATGCT |
| SEQ ID NO: 1067 | GCCTCCCGTAGGAGT |
| | SEQ ID NO: 1068 |
| CCATGCAA | GCCTCCCTCGCGCCATCAGCCATGCAACATGCT |
| SEQ ID NO: 1069 | GCCTCCCGTAGGAGT |
| | SEQ ID NO: 1070 |
| CCATGCTT | GCCTCCCTCGCGCCATCAGCCATGCTTCATGCT |
| SEQ ID NO: 1071 | GCCTCCCGTAGGAGT |
| | SEQ ID NO: 1072 |
| CCATGGAT | GCCTCCCTCGCGCCATCAGCCATGGATCATGCT |
| SEQ ID NO: 1073 | GCCTCCCGTAGGAGT |
| | SEQ ID NO: 1074 |
| CCATGGTA | GCCTCCCTCGCGCCATCAGCCATGGTACATGCT |
| SEQ ID NO: 1075 | GCCTCCCGTAGGAGT |
| | SEQ ID NO: 1076 |
| CCATTACC | GCCTCCCTCGCGCCATCAGCCATTACCCATGCT |
| SEQ ID NO: 1077 | GCCTCCCGTAGGAGT |
| | SEQ ID NO: 1078 |
| CCATTAGG | GCCTCCCTCGCGCCATCAGCCATTAGGCATGCT |
| SEQ ID NO: 1079 | GCCTCCCGTAGGAGT |
| | SEQ ID NO: 1080 |
| CCGCAATA | GCCTCCCTCGCGCCATCAGCCGCAATACATGCT |
| SEQ ID NO: 1081 | GCCTCCCGTAGGAGT |
| | SEQ ID NO: 1082 |
| CCGCATAA | GCCTCCCTCGCGCCATCAGCCGCATAACATGCT |
| SEQ ID NO: 1083 | GCCTCCCGTAGGAGT |
| | SEQ ID NO: 1084 |
| CCGCTATT | GCCTCCCTCGCGCCATCAGCCGCTATTCATGCT |
| SEQ ID NO: 1085 | GCCTCCCGTAGGAGT |
| | SEQ ID NO: 1086 |
| CCGCTTAT | GCCTCCCTCGCGCCATCAGCCGCTTATCATGCT |
| SEQ ID NO: 1087 | GCCTCCCGTAGGAGT |
| | SEQ ID NO: 1088 |
| CCGGAATT | GCCTCCCTCGCGCCATCAGCCGGAATTCATGCT |
| SEQ ID NO: 1089 | GCCTCCCGTAGGAGT |
| | SEQ ID NO: 1090 |
| CCGGATAT | GCCTCCCTCGCGCCATCAGCCGGATATCATGCT |
| SEQ ID NO: 1091 | GCCTCCCGTAGGAGT |
| | SEQ ID NO: 1092 |
| CCGGATTA | GCCTCCCTCGCGCCATCAGCCGGATTACATGCT |
| SEQ ID NO: 1093 | GCCTCCCGTAGGAGT |
| | SEQ ID NO: 1094 |
| CCGGTAAT | GCCTCCCTCGCGCCATCAGCCGGTAATCATGCT |
| SEQ ID NO: 1095 | GCCTCCCGTAGGAGT |
| | SEQ ID NO: 1096 |
| CCGGTATA | GCCTCCCTCGCGCCATCAGCCGGTATACATGCT |
| SEQ ID NO: 1097 | GCCTCCCGTAGGAGT |
| | SEQ ID NO: 1098 |
| CCGGTTAA | GCCTCCCTCGCGCCATCAGCCGGTTAACATGCT |
| SEQ ID NO: 1099 | GCCTCCCGTAGGAGT |
| | SEQ ID NO: 1100 |
| CCTAATCC | GCCTCCCTCGCGCCATCAGCCTAATCCCATGCT |
| SEQ ID NO: 1101 | GCCTCCCGTAGGAGT |
| | SEQ ID NO: 1102 |
| CCTAATGG | GCCTCCCTCGCGCCATCAGCCTAATGGCATGCT |
| SEQ ID NO: 1103 | GCCTCCCGTAGGAGT |
| | SEQ ID NO: 1104 |
| CCTACCAT | GCCTCCCTCGCGCCATCAGCCTACCATCATGCT |
| SEQ ID NO: 1105 | GCCTCCCGTAGGAGT |
| | SEQ ID NO: 1106 |
| CCTACCTA | GCCTCCCTCGCGCCATCAGCCTACCTACATGCT |
| SEQ ID NO: 1107 | GCCTCCCGTAGGAGT |
| | SEQ ID NO: 1108 |
| CCTACGAA | GCCTCCCTCGCGCCATCAGCCTACGAACATGCT |
| SEQ ID NO: 1109 | GCCTCCCGTAGGAGT |
| | SEQ ID NO: 1110 |
| CCTACGTT | GCCTCCCTCGCGCCATCAGCCTACGTTCATGCT |
| SEQ ID NO: 1111 | GCCTCCCGTAGGAGT |
| | SEQ ID NO: 1112 |
| CCTAGCAA | GCCTCCCTCGCGCCATCAGCCTAGCAACATGCT |
| SEQ ID NO: 1113 | GCCTCCCGTAGGAGT |
| | SEQ ID NO: 1114 |
| CCTAGCTT | GCCTCCCTCGCGCCATCAGCCTAGCTTCATGCT |
| SEQ ID NO: 1115 | GCCTCCCGTAGGAGT |
| | SEQ ID NO: 1116 |
| CCTAGGAT | GCCTCCCTCGCGCCATCAGCCTAGGATCATGCT |
| SEQ ID NO: 1117 | GCCTCCCGTAGGAGT |
| | SEQ ID NO: 1118 |
| CCTAGGTA | GCCTCCCTCGCGCCATCAGCCTAGGTACATGCT |
| SEQ ID NO: 1119 | GCCTCCCGTAGGAGT |
| | SEQ ID NO: 1120 |
| CCTATACC | GCCTCCCTCGCGCCATCAGCCTATACCCATGCT |
| SEQ ID NO: 1121 | GCCTCCCGTAGGAGT |
| | SEQ ID NO: 1122 |
| CCTATAGG | GCCTCCCTCGCGCCATCAGCCTATAGGCATGCT |
| SEQ ID NO: 1123 | GCCTCCCGTAGGAGT |
| | SEQ ID NO: 1124 |
| CCTATTCG | GCCTCCCTCGCGCCATCAGCCTATTCGCATGCT |
| SEQ ID NO: 1125 | GCCTCCCGTAGGAGT |
| | SEQ ID NO: 1126 |
| CCTATTGC | GCCTCCCTCGCGCCATCAGCCTATTGCCATGCT |
| SEQ ID NO: 1127 | GCCTCCCGTAGGAGT |
| | SEQ ID NO: 1128 |
| CCTTAACC | GCCTCCCTCGCGCCATCAGCCTTAACCCATGCT |
| SEQ ID NO: 1129 | GCCTCCCGTAGGAGT |
| | SEQ ID NO: 1130 |
| CCTTAAGG | GCCTCCCTCGCGCCATCAGCCTTAAGGCATGCT |
| SEQ ID NO: 1131 | GCCTCCCGTAGGAGT |
| | SEQ ID NO: 1132 |
| CCTTATCG | GCCTCCCTCGCGCCATCAGCCTTATCGCATGCT |
| SEQ ID NO: 1133 | GCCTCCCGTAGGAGT |
| | SEQ ID NO: 1134 |
| CCTTATGC | GCCTCCCTCGCGCCATCAGCCTTATGCCATGCT |
| SEQ ID NO: 1135 | GCCTCCCGTAGGAGT |
| | SEQ ID NO: 1136 |
| CCTTCCAA | GCCTCCCTCGCGCCATCAGCCTTCCAACATGCT |
| SEQ ID NO: 1137 | GCCTCCCGTAGGAGT |
| | SEQ ID NO: 1138 |
| CCTTCCTT | GCCTCCCTCGCGCCATCAGCCTTCCTTCATGCT |
| SEQ ID NO: 1139 | GCCTCCCGTAGGAGT |
| | SEQ ID NO: 1140 |
| CCTTCGAT | GCCTCCCTCGCGCCATCAGCCTTCGATCATGCT |
| SEQ ID NO: 1141 | GCCTCCCGTAGGAGT |
| | SEQ ID NO: 1142 |
| CCTTCGTA | GCCTCCCTCGCGCCATCAGCCTTCGTACATGCT |
| SEQ ID NO: 1143 | GCCTCCCGTAGGAGT |
| | SEQ ID NO: 1144 |
| CCTTGCAT | GCCTCCCTCGCGCCATCAGCCTTGCATCATGCT |
| SEQ ID NO: 1145 | GCCTCCCGTAGGAGT |
| | SEQ ID NO: 1146 |
| CCTTGCTA | GCCTCCCTCGCGCCATCAGCCTTGCTACATGCT |
| SEQ ID NO: 1147 | GCCTCCCGTAGGAGT |
| | SEQ ID NO: 1148 |
| CCTTGGAA | GCCTCCCTCGCGCCATCAGCCTTGGAACATGCT |
| SEQ ID NO: 1149 | GCCTCCCGTAGGAGT |
| | SEQ ID NO: 1150 |
| CCTTGGTT | GCCTCCCTCGCGCCATCAGCCTTGGTTCATGCT |
| SEQ ID NO: 1151 | GCCTCCCGTAGGAGT |
| | SEQ ID NO: 1152 |
| CGAACCAT | GCCTCCCTCGCGCCATCAGCGAACCATCATGCT |
| SEQ ID NO: 1153 | GCCTCCCGTAGGAGT |
| | SEQ ID NO: 1154 |
| CGAACCTA | GCCTCCCTCGCGCCATCAGCGAACCTACATGCT |
| SEQ ID NO: 1155 | GCCTCCCGTAGGAGT |
| | SEQ ID NO: 1156 |
| CGAACGAA | GCCTCCCTCGCGCCATCAGCGAACGAACATGCT |
| SEQ ID NO: 1157 | GCCTCCCGTAGGAGT |
| | SEQ ID NO: 1158 |
| CGAACGTT | GCCTCCCTCGCGCCATCAGCGAACGTTCATGCT |
| SEQ ID NO: 1159 | GCCTCCCGTAGGAGT |
| | SEQ ID NO: 1160 |
| CGAAGCAA | GCCTCCCTCGCGCCATCAGCGAAGCAACATGCT |
| SEQ ID NO: 1161 | GCCTCCCGTAGGAGT |
| | SEQ ID NO: 1162 |
| CGAAGCTT | GCCTCCCTCGCGCCATCAGCGAAGCTTCATGCT |
| SEQ ID NO: 1163 | GCCTCCCGTAGGAGT |
| | SEQ ID NO: 1164 |
| CGAAGGAT | GCCTCCCTCGCGCCATCAGCGAAGGATCATGCT |
| SEQ ID NO: 1165 | GCCTCCCGTAGGAGT |
| | SEQ ID NO: 1166 |
| CGAAGGTA | GCCTCCCTCGCGCCATCAGCGAAGGTACATGCT |
| SEQ ID NO: 1167 | GCCTCCCGTAGGAGT |
| | SEQ ID NO: 1168 |
| CGAATACC | GCCTCCCTCGCGCCATCAGCGAATACCCATGCT |
| SEQ ID NO: 1169 | GCCTCCCGTAGGAGT |
| | SEQ ID NO: 1170 |
| CGAATAGG | GCCTCCCTCGCGCCATCAGCGAATAGGCATGCT |
| SEQ ID NO: 1171 | GCCTCCCGTAGGAGT |
| | SEQ ID NO: 1172 |
| CGAATTCG | GCCTCCCTCGCGCCATCAGCGAATTCGCATGCT |
| SEQ ID NO: 1173 | GCCTCCCGTAGGAGT |
| | SEQ ID NO: 1174 |
| CGAATTGC | GCCTCCCTCGCGCCATCAGCGAATTGCCATGCT |
| SEQ ID NO: 1175 | GCCTCCCGTAGGAGT |
| | SEQ ID NO: 1176 |
| CGATAACC | GCCTCCCTCGCGCCATCAGCGATAACCCATGCT |
| SEQ ID NO: 1177 | GCCTCCCGTAGGAGT |
| | SEQ ID NO: 1178 |
| CGATAAGG | GCCTCCCTCGCGCCATCAGCGATAAGGCATGCT |
| SEQ ID NO: 1179 | GCCTCCCGTAGGAGT |
| | SEQ ID NO: 1180 |
| CGATATCG | GCCTCCCTCGCGCCATCAGCGATATCGCATGCT |
| SEQ ID NO: 1181 | GCCTCCCGTAGGAGT |
| | SEQ ID NO: 1182 |
| CGATATGC | GCCTCCCTCGCGCCATCAGCGATATGCCATGCT |
| SEQ ID NO: 1183 | GCCTCCCGTAGGAGT |
| | SEQ ID NO: 1184 |
| CGATCCAA | GCCTCCCTCGCGCCATCAGCGATCCAACATGCT |
| SEQ ID NO: 1185 | GCCTCCCGTAGGAGT |
| | SEQ ID NO: 1186 |
| CGATCCTT | GCCTCCCTCGCGCCATCAGCGATCCTTCATGCT |
| SEQ ID NO: 1187 | GCCTCCCGTAGGAGT |
| | SEQ ID NO: 1188 |
| CGATCGAT | GCCTCCCTCGCGCCATCAGCGATCGATCATGCT |
| SEQ ID NO: 1189 | GCCTCCCGTAGGAGT |
| | SEQ ID NO: 1190 |
| CGATCGTA | GCCTCCCTCGCGCCATCAGCGATCGTACATGCT |
| SEQ ID NO: 1191 | GCCTCCCGTAGGAGT |
| | SEQ ID NO: 1192 |
| CGATGCAT | GCCTCCCTCGCGCCATCAGCGATGCATCATGCT |
| SEQ ID NO: 1193 | GCCTCCCGTAGGAGT |
| | SEQ ID NO: 1194 |
| CGATGCTA | GCCTCCCTCGCGCCATCAGCGATGCTACATGCT |
| SEQ ID NO: 1195 | GCCTCCCGTAGGAGT |
| | SEQ ID NO: 1196 |
| CGATGGAA | GCCTCCCTCGCGCCATCAGCGATGGAACATGCT |
| SEQ ID NO: 1197 | GCCTCCCGTAGGAGT |
| | SEQ ID NO: 1198 |
| CGATGGTT | GCCTCCCTCGCGCCATCAGCGATGGTTCATGCT |
| SEQ ID NO: 1199 | GCCTCCCGTAGGAGT |
| | SEQ ID NO: 1200 |
| CGATTACG | GCCTCCCTCGCGCCATCAGCGATTACGCATGCT |
| SEQ ID NO: 1201 | GCCTCCCGTAGGAGT |
| | SEQ ID NO: 1202 |
| CGATTAGC | GCCTCCCTCGCGCCATCAGCGATTAGCCATGCT |
| SEQ ID NO: 1203 | GCCTCCCGTAGGAGT |
| | SEQ ID NO: 1204 |
| CGCCAATA | GCCTCCCTCGCGCCATCAGCGCCAATACATGCT |
| SEQ ID NO: 1205 | GCCTCCCGTAGGAGT |
| | SEQ ID NO: 1206 |
| CGCCATAA | GCCTCCCTCGCGCCATCAGCGCCATAACATGCT |
| SEQ ID NO: 1207 | GCCTCCCGTAGGAGT |
| | SEQ ID NO: 1208 |
| CGCCTATT | GCCTCCCTCGCGCCATCAGCGCCTATTCATGCT |
| SEQ ID NO: 1209 | GCCTCCCGTAGGAGT |
| | SEQ ID NO: 1210 |
| CGCCTTAT | GCCTCCCTCGCGCCATCAGCGCCTTATCATGCT |
| SEQ ID NO: 1211 | GCCTCCCGTAGGAGT |
| | SEQ ID NO: 1212 |
| CGCGAATT | GCCTCCCTCGCGCCATCAGCGCGAATTCATGCT |
| SEQ ID NO: 1213 | GCCTCCCGTAGGAGT |
| | SEQ ID NO: 1214 |
| CGCGATAT | GCCTCCCTCGCGCCATCAGCGCGATATCATGCT |
| SEQ ID NO: 1215 | GCCTCCCGTAGGAGT |
| | SEQ ID NO: 1216 |
| CGCGATTA | GCCTCCCTCGCGCCATCAGCGCGATTACATGCT |
| SEQ ID NO: 1217 | GCCTCCCGTAGGAGT |
| | SEQ ID NO: 1218 |
| CGCGTAAT | GCCTCCCTCGCGCCATCAGCGCGTAATCATGCT |
| SEQ ID NO: 1219 | GCCTCCCGTAGGAGT |
| | SEQ ID NO: 1220 |
| CGCGTATA | GCCTCCCTCGCGCCATCAGCGCGTATACATGCT |
| SEQ ID NO: 1221 | GCCTCCCGTAGGAGT |
| | SEQ ID NO: 1222 |
| CGCGTTAA | GCCTCCCTCGCGCCATCAGCGCGTTAACATGCT |
| SEQ ID NO: 1223 | GCCTCCCGTAGGAGT |
| | SEQ ID NO: 1224 |
| CGGCAATT | GCCTCCCTCGCGCCATCAGCGGCAATTCATGCT |
| SEQ ID NO: 1225 | GCCTCCCGTAGGAGT |
| | SEQ ID NO: 1226 |
| CGGCATAT | GCCTCCCTCGCGCCATCAGCGGCATATCATGCT |
| SEQ ID NO: 1227 | GCCTCCCGTAGGAGT |
| | SEQ ID NO: 1228 |
| CGGCATTA | GCCTCCCTCGCGCCATCAGCGGCATTACATGCT |
| SEQ ID NO: 1229 | GCCTCCCGTAGGAGT |
| | SEQ ID NO: 1230 |
| CGGCTAAT | GCCTCCCTCGCGCCATCAGCGGCTAATCATGCT |
| SEQ ID NO: 1231 | GCCTCCCGTAGGAGT |
| | SEQ ID NO: 1232 |
| CGGCTATA | GCCTCCCTCGCGCCATCAGCGGCTATACATGCT |
| SEQ ID NO: 1233 | GCCTCCCGTAGGAGT |
| | SEQ ID NO: 1234 |
| CGGCTTAA | GCCTCCCTCGCGCCATCAGCGGCTTAACATGCT |
| SEQ ID NO: 1235 | GCCTCCCGTAGGAGT |
| | SEQ ID NO: 1236 |
| CGTAATCG | GCCTCCCTCGCGCCATCAGCGTAATCGCATGCT |
| SEQ ID NO: 1237 | GCCTCCCGTAGGAGT |
| | SEQ ID NO: 1238 |
| CGTAATGC | GCCTCCCTCGCGCCATCAGCGTAATGCCATGCT |
| SEQ ID NO: 1239 | GCCTCCCGTAGGAGT |
| | SEQ ID NO: 1240 |
| CGTACCAA | GCCTCCCTCGCGCCATCAGCGTACCAACATGCT |
| SEQ ID NO: 1241 | GCCTCCCGTAGGAGT |
| | SEQ ID NO: 1242 |
| CGTACCTT | GCCTCCCTCGCGCCATCAGCGTACCTTCATGCT |
| SEQ ID NO: 1243 | GCCTCCCGTAGGAGT |
| | SEQ ID NO: 1244 |
| CGTACGAT | GCCTCCCTCGCGCCATCAGCGTACGATCATGCT |
| SEQ ID NO: 1245 | GCCTCCCGTAGGAGT |
| | SEQ ID NO: 1246 |
| CGTACGTA | GCCTCCCTCGCGCCATCAGCGTACGTACATGCT |
| SEQ ID NO: 1247 | GCCTCCCGTAGGAGT |
| | SEQ ID NO: 1248 |
| CGTAGCAT | GCCTCCCTCGCGCCATCAGCGTAGCATCATGCT |
| SEQ ID NO: 1249 | GCCTCCCGTAGGAGT |
| | SEQ ID NO: 1250 |
| CGTAGCTA | GCCTCCCTCGCGCCATCAGCGTAGCTACATGCT |
| SEQ ID NO: 1251 | GCCTCCCGTAGGAGT |
| | SEQ ID NO: 1252 |
| CGTAGGAA | GCCTCCCTCGCGCCATCAGCGTAGGAACATGCT |
| SEQ ID NO: 1253 | GCCTCCCGTAGGAGT |
| | SEQ ID NO: 1254 |
| CGTAGGTT | GCCTCCCTCGCGCCATCAGCGTAGGTTCATGCT |
| SEQ ID NO: 1255 | GCCTCCCGTAGGAGT |
| | SEQ ID NO: 1256 |
| CGTATACG | GCCTCCCTCGCGCCATCAGCGTATACGCATGCT |
| SEQ ID NO: 1257 | GCCTCCCGTAGGAGT |
| | SEQ ID NO: 1258 |
| CGTATAGC | GCCTCCCTCGCGCCATCAGCGTATAGCCATGCT |
| SEQ ID NO: 1259 | GCCTCCCGTAGGAGT |
| | SEQ ID NO: 1260 |
| CGTATTCC | GCCTCCCTCGCGCCATCAGCGTATTCCCATGCT |
| SEQ ID NO: 1261 | GCCTCCCGTAGGAGT |
| | SEQ ID NO: 1262 |
| CGTATTGG | GCCTCCCTCGCGCCATCAGCGTATTGGCATGCT |
| SEQ ID NO: 1263 | GCCTCCCGTAGGAGT |
| | SEQ ID NO: 1264 |
| CGTTAACG | GCCTCCCTCGCGCCATCAGCGTTAACGCATGCT |
| SEQ ID NO: 1265 | GCCTCCCGTAGGAGT |
| | SEQ ID NO: 1266 |
| CGTTAAGC | GCCTCCCTCGCGCCATCAGCGTTAAGCCATGCT |
| SEQ ID NO: 1267 | GCCTCCCGTAGGAGT |
| | SEQ ID NO: 1268 |
| CGTTATCC | GCCTCCCTCGCGCCATCAGCGTTATCCCATGCT |
| SEQ ID NO: 1269 | GCCTCCCGTAGGAGT |
| | SEQ ID NO: 1270 |
| CGTTATGG | GCCTCCCTCGCGCCATCAGCGTTATGGCATGCT |
| SEQ ID NO: 1271 | GCCTCCCGTAGGAGT |
| | SEQ ID NO: 1272 |
| CGTTCCAT | GCCTCCCTCGCGCCATCAGCGTTCCATCATGCT |
| SEQ ID NO: 1273 | GCCTCCCGTAGGAGT |
| | SEQ ID NO: 1274 |
| CGTTCCTA | GCCTCCCTCGCGCCATCAGCGTTCCTACATGCT |
| SEQ ID NO: 1275 | GCCTCCCGTAGGAGT |
| | SEQ ID NO: 1276 |
| CGTTCGAA | GCCTCCCTCGCGCCATCAGCGTTCGAACATGCT |
| SEQ ID NO: 1277 | GCCTCCCGTAGGAGT |
| | SEQ ID NO: 1278 |
| CGTTCGTT | GCCTCCCTCGCGCCATCAGCGTTCGTTCATGCT |
| SEQ ID NO: 1279 | GCCTCCCGTAGGAGT |
| | SEQ ID NO: 1280 |
| CGTTGCAA | GCCTCCCTCGCGCCATCAGCGTTGCAACATGCT |
| SEQ ID NO: 1281 | GCCTCCCGTAGGAGT |
| | SEQ ID NO: 1282 |
| CGTTGCTT | GCCTCCCTCGCGCCATCAGCGTTGCTTCATGCT |
| SEQ ID NO: 1283 | GCCTCCCGTAGGAGT |
| | SEQ ID NO: 1284 |
| CGTTGGAT | GCCTCCCTCGCGCCATCAGCGTTGGATCATGCT |
| SEQ ID NO: 1285 | GCCTCCCGTAGGAGT |
| | SEQ ID NO: 1286 |
| CGTTGGTA | GCCTCCCTCGCGCCATCAGCGTTGGTACATGCT |
| SEQ ID NO: 1287 | GCCTCCCGTAGGAGT |
| | SEQ ID NO: 1288 |
| CTACACCT | GCCTCCCTCGCGCCATCAGCTACACCTCATGCT |
| SEQ ID NO: 1289 | GCCTCCCGTAGGAGT |
| | SEQ ID NO: 1290 |
| CTACACGA | GCCTCCCTCGCGCCATCAGCTACACGACATGCT |
| SEQ ID NO: 1291 | GCCTCCCGTAGGAGT |
| | SEQ ID NO: 1292 |
| CTACAGCA | GCCTCCCTCGCGCCATCAGCTACAGCACATGCT |
| SEQ ID NO: 1293 | GCCTCCCGTAGGAGT |
| | SEQ ID NO: 1294 |
| CTACAGGT | GCCTCCCTCGCGCCATCAGCTACAGGTCATGCT |
| SEQ ID NO: 1295 | GCCTCCCGTAGGAGT |
| | SEQ ID NO: 1296 |
| CTACCAAG | GCCTCCCTCGCGCCATCAGCTACCAAGCATGCT |
| SEQ ID NO: 1297 | GCCTCCCGTAGGAGT |
| | SEQ ID NO: 1298 |
| CTACCATC | GCCTCCCTCGCGCCATCAGCTACCATCCATGCT |
| SEQ ID NO: 1299 | GCCTCCCGTAGGAGT |
| | SEQ ID NO: 1300 |
| CTACCTAC | GCCTCCCTCGCGCCATCAGCTACCTACCATGCT |
| SEQ ID NO: 1301 | GCCTCCCGTAGGAGT |
| | SEQ ID NO: 1302 |
| CTACCTTG | GCCTCCCTCGCGCCATCAGCTACCTTGCATGCT |
| SEQ ID NO: 1303 | GCCTCCCGTAGGAGT |
| | SEQ ID NO: 1304 |
| CTACGAAC | GCCTCCCTCGCGCCATCAGCTACGAACCATGCT |
| SEQ ID NO: 1305 | GCCTCCCGTAGGAGT |
| | SEQ ID NO: 1306 |
| CTACGATG | GCCTCCCTCGCGCCATCAGCTACGATGCATGCT |
| SEQ ID NO: 1307 | GCCTCCCGTAGGAGT |
| | SEQ ID NO: 1308 |
| CTACGTAG | GCCTCCCTCGCGCCATCAGCTACGTAGCATGCT |
| SEQ ID NO: 1309 | GCCTCCCGTAGGAGT |
| | SEQ ID NO: 1310 |
| CTACGTTC | GCCTCCCTCGCGCCATCAGCTACGTTCCATGCT |
| SEQ ID NO: 1311 | GCCTCCCGTAGGAGT |
| | SEQ ID NO: 1312 |
| CTACTCCA | GCCTCCCTCGCGCCATCAGCTACTCCACATGCT |
| SEQ ID NO: 1313 | GCCTCCCGTAGGAGT |
| | SEQ ID NO: 1314 |
| CTACTCGT | GCCTCCCTCGCGCCATCAGCTACTCGTCATGCT |
| SEQ ID NO: 1315 | GCCTCCCGTAGGAGT |
| | SEQ ID NO: 1316 |
| CTACTGCT | GCCTCCCTCGCGCCATCAGCTACTGCTCATGCT |
| SEQ ID NO: 1317 | GCCTCCCGTAGGAGT |
| | SEQ ID NO: 1318 |
| CTACTGGA | GCCTCCCTCGCGCCATCAGCTACTGGACATGCT |
| SEQ ID NO: 1319 | GCCTCCCGTAGGAGT |
| | SEQ ID NO: 1320 |
| CTAGACCA | GCCTCCCTCGCGCCATCAGCTAGACCACATGCT |
| SEQ ID NO: 1321 | GCCTCCCGTAGGAGT |
| | SEQ ID NO: 1322 |
| CTAGACGT | GCCTCCCTCGCGCCATCAGCTAGACGTCATGCT |
| SEQ ID NO: 1323 | GCCTCCCGTAGGAGT |
| | SEQ ID NO: 1324 |
| CTAGAGCT | GCCTCCCTCGCGCCATCAGCTAGAGCTCATGCT |
| SEQ ID NO: 1325 | GCCTCCCGTAGGAGT |
| | SEQ ID NO: 1326 |
| CTAGAGGA | GCCTCCCTCGCGCCATCAGCTAGAGGACATGCT |
| SEQ ID NO: 1327 | GCCTCCCGTAGGAGT |
| | SEQ ID NO: 1328 |
| CTAGCAAC | GCCTCCCTCGCGCCATCAGCTAGCAACCATGCT |
| SEQ ID NO: 1329 | GCCTCCCGTAGGAGT |
| | SEQ ID NO: 1330 |
| CTAGCATG | GCCTCCCTCGCGCCATCAGCTAGCATGCATGCT |
| SEQ ID NO: 1331 | GCCTCCCGTAGGAGT |
| | SEQ ID NO: 1332 |
| CTAGCTAG | GCCTCCCTCGCGCCATCAGCTAGCTAGCATGCT |
| SEQ ID NO: 1333 | GCCTCCCGTAGGAGT |
| | SEQ ID NO: 1334 |
| CTAGCTTC | GCCTCCCTCGCGCCATCAGCTAGCTTCCATGCT |
| SEQ ID NO: 1335 | GCCTCCCGTAGGAGT |
| | SEQ ID NO: 1336 |
| CTAGGAAG | GCCTCCCTCGCGCCATCAGCTAGGAAGCATGCT |
| SEQ ID NO: 1337 | GCCTCCCGTAGGAGT |
| | SEQ ID NO: 1338 |
| CTAGGATC | GCCTCCCTCGCGCCATCAGCTAGGATCCATGCT |
| SEQ ID NO: 1339 | GCCTCCCGTAGGAGT |
| | SEQ ID NO: 1340 |
| CTAGGTAC | GCCTCCCTCGCGCCATCAGCTAGGTACCATGCT |
| SEQ ID NO: 1341 | GCCTCCCGTAGGAGT |
| | SEQ ID NO: 1342 |
| CTAGGTTG | GCCTCCCTCGCGCCATCAGCTAGGTTGCATGCT |
| SEQ ID NO: 1343 | GCCTCCCGTAGGAGT |
| | SEQ ID NO: 1344 |
| CTAGTCCT | GCCTCCCTCGCGCCATCAGCTAGTCCTCATGCT |
| SEQ ID NO: 1345 | GCCTCCCGTAGGAGT |
| | SEQ ID NO: 1346 |
| CTAGTCGA | GCCTCCCTCGCGCCATCAGCTAGTCGACATGCT |
| SEQ ID NO: 1347 | GCCTCCCGTAGGAGT |
| | SEQ ID NO: 1348 |
| CTAGTGCA | GCCTCCCTCGCGCCATCAGCTAGTGCACATGCT |
| SEQ ID NO: 1349 | GCCTCCCGTAGGAGT |
| | SEQ ID NO: 1350 |
| CTAGTGGT | GCCTCCCTCGCGCCATCAGCTAGTGGTCATGCT |
| SEQ ID NO: 1351 | GCCTCCCGTAGGAGT |
| | SEQ ID NO: 1352 |
| CTCAACAG | GCCTCCCTCGCGCCATCAGCTCAACAGCATGCT |
| SEQ ID NO: 1353 | GCCTCCCGTAGGAGT |
| | SEQ ID NO: 1354 |
| CTCAACTC | GCCTCCCTCGCGCCATCAGCTCAACTCCATGCT |
| SEQ ID NO: 1355 | GCCTCCCGTAGGAGT |
| | SEQ ID NO: 1356 |
| CTCAAGAC | GCCTCCCTCGCGCCATCAGCTCAAGACCATGCT |
| SEQ ID NO: 1357 | GCCTCCCGTAGGAGT |
| | SEQ ID NO: 1358 |
| CTCAAGTG | GCCTCCCTCGCGCCATCAGCTCAAGTGCATGCT |
| SEQ ID NO: 1359 | GCCTCCCGTAGGAGT |
| | SEQ ID NO: 1360 |
| CTCACACT | GCCTCCCTCGCGCCATCAGCTCACACTCATGCT |
| SEQ ID NO: 1361 | GCCTCCCGTAGGAGT |
| | SEQ ID NO: 1362 |
| CTCACAGA | GCCTCCCTCGCGCCATCAGCTCACAGACATGCT |
| SEQ ID NO: 1363 | GCCTCCCGTAGGAGT |
| | SEQ ID NO: 1364 |
| CTCACTCA | GCCTCCCTCGCGCCATCAGCTCACTCACATGCT |
| SEQ ID NO: 1365 | GCCTCCCGTAGGAGT |
| | SEQ ID NO: 1366 |
| CTCACTGT | GCCTCCCTCGCGCCATCAGCTCACTGTCATGCT |
| SEQ ID NO: 1367 | GCCTCCCGTAGGAGT |
| | SEQ ID NO: 1368 |
| CTCAGACA | GCCTCCCTCGCGCCATCAGCTCAGACACATGCT |
| SEQ ID NO: 1369 | GCCTCCCGTAGGAGT |
| | SEQ ID NO: 1370 |
| CTCAGAGT | GCCTCCCTCGCGCCATCAGCTCAGAGTCATGCT |
| SEQ ID NO: 1371 | GCCTCCCGTAGGAGT |
| | SEQ ID NO: 1372 |
| CTCAGTCT | GCCTCCCTCGCGCCATCAGCTCAGTCTCATGCT |
| SEQ ID NO: 1373 | GCCTCCCGTAGGAGT |
| | SEQ ID NO: 1374 |
| CTCAGTGA | GCCTCCCTCGCGCCATCAGCTCAGTGACATGCT |
| SEQ ID NO: 1375 | GCCTCCCGTAGGAGT |
| | SEQ ID NO: 1376 |
| CTCATCAC | GCCTCCCTCGCGCCATCAGCTCATCACCATGCT |
| SEQ ID NO: 1377 | GCCTCCCGTAGGAGT |
| | SEQ ID NO: 1378 |
| CTCATCTG | GCCTCCCTCGCGCCATCAGCTCATCTGCATGCT |
| SEQ ID NO: 1379 | GCCTCCCGTAGGAGT |
| | SEQ ID NO: 1380 |
| CTCATGAG | GCCTCCCTCGCGCCATCAGCTCATGAGCATGCT |
| SEQ ID NO: 1381 | GCCTCCCGTAGGAGT |
| | SEQ ID NO: 1382 |
| CTCATGTC | GCCTCCCTCGCGCCATCAGCTCATGTCCATGCT |
| SEQ ID NO: 1383 | GCCTCCCGTAGGAGT |
| | SEQ ID NO: 1384 |
| CTCTACAC | GCCTCCCTCGCGCCATCAGCTCTACACCATGCT |
| SEQ ID NO: 1385 | GCCTCCCGTAGGAGT |
| | SEQ ID NO: 1386 |
| CTCTACTG | GCCTCCCTCGCGCCATCAGCTCTACTGCATGCT |
| SEQ ID NO: 1387 | GCCTCCCGTAGGAGT |
| | SEQ ID NO: 1388 |
| CTCTAGAG | GCCTCCCTCGCGCCATCAGCTCTAGAGCATGCT |
| SEQ ID NO: 1389 | GCCTCCCGTAGGAGT |
| | SEQ ID NO: 1390 |
| CTCTAGTC | GCCTCCCTCGCGCCATCAGCTCTAGTCCATGCT |
| SEQ ID NO: 1391 | GCCTCCCGTAGGAGT |
| | SEQ ID NO: 1392 |
| CTCTCACA | GCCTCCCTCGCGCCATCAGCTCTCACACATGCT |
| SEQ ID NO: 1393 | GCCTCCCGTAGGAGT |
| | SEQ ID NO: 1394 |
| CTCTCAGT | GCCTCCCTCGCGCCATCAGCTCTCAGTCATGCT |
| SEQ ID NO: 1395 | GCCTCCCGTAGGAGT |
| | SEQ ID NO: 1396 |
| CTCTCTCT | GCCTCCCTCGCGCCATCAGCTCTCTCTCATGCT |
| SEQ ID NO: 1397 | GCCTCCCGTAGGAGT |
| | SEQ ID NO: 1398 |
| CTCTCTGA | GCCTCCCTCGCGCCATCAGCTCTCTGACATGCT |
| SEQ ID NO: 1399 | GCCTCCCGTAGGAGT |
| | SEQ ID NO: 1400 |
| CTCTGACT | GCCTCCCTCGCGCCATCAGCTCTGACTCATGCT |
| SEQ ID NO: 1401 | GCCTCCCGTAGGAGT |
| | SEQ ID NO: 1402 |
| CTCTGAGA | GCCTCCCTCGCGCCATCAGCTCTGAGACATGCT |
| SEQ ID NO: 1403 | GCCTCCCGTAGGAGT |
| | SEQ ID NO: 1404 |
| CTCTGTCA | GCCTCCCTCGCGCCATCAGCTCTGTCACATGCT |
| SEQ ID NO: 1405 | GCCTCCCGTAGGAGT |
| | SEQ ID NO: 1406 |
| CTCTGTGT | GCCTCCCTCGCGCCATCAGCTCTGTGTCATGCT |
| SEQ ID NO: 1407 | GCCTCCCGTAGGAGT |
| | SEQ ID NO: 1408 |
| CTCTTCAG | GCCTCCCTCGCGCCATCAGCTCTTCAGCATGCT |
| SEQ ID NO: 1409 | GCCTCCCGTAGGAGT |
| | SEQ ID NO: 1410 |
| CTCTTCTC | GCCTCCCTCGCGCCATCAGCTCTTCTCCATGCT |
| SEQ ID NO: 1411 | GCCTCCCGTAGGAGT |
| | SEQ ID NO: 1412 |
| CTCTTGAC | GCCTCCCTCGCGCCATCAGCTCTTGACCATGCT |
| SEQ ID NO: 1413 | GCCTCCCGTAGGAGT |
| | SEQ ID NO: 1414 |
| CTCTTGTG | GCCTCCCTCGCGCCATCAGCTCTTGTGCATGCT |
| SEQ ID NO: 1415 | GCCTCCCGTAGGAGT |
| | SEQ ID NO: 1416 |
| CTGAACAC | GCCTCCCTCGCGCCATCAGCTGAACACCATGCT |
| SEQ ID NO: 1417 | GCCTCCCGTAGGAGT |
| | SEQ ID NO: 1418 |
| CTGAACTG | GCCTCCCTCGCGCCATCAGCTGAACTGCATGCT |
| SEQ ID NO: 1419 | GCCTCCCGTAGGAGT |
| | SEQ ID NO: 1420 |
| CTGAAGAG | GCCTCCCTCGCGCCATCAGCTGAAGAGCATGCT |
| SEQ ID NO: 1421 | GCCTCCCGTAGGAGT |
| | SEQ ID NO: 1422 |
| CTGAAGTC | GCCTCCCTCGCGCCATCAGCTGAAGTCCATGCT |
| SEQ ID NO: 1423 | GCCTCCCGTAGGAGT |
| | SEQ ID NO: 1424 |
| CTGACACA | GCCTCCCTCGCGCCATCAGCTGACACACATGCT |
| SEQ ID NO: 1425 | GCCTCCCGTAGGAGT |
| | SEQ ID NO: 1426 |
| CTGACAGT | GCCTCCCTCGCGCCATCAGCTGACAGTCATGCT |
| SEQ ID NO: 1427 | GCCTCCCGTAGGAGT |
| | SEQ ID NO: 1428 |
| CTGACTCT | GCCTCCCTCGCGCCATCAGCTGACTCTCATGCT |
| SEQ ID NO: 1429 | GCCTCCCGTAGGAGT |
| | SEQ ID NO: 1430 |
| CTGACTGA | GCCTCCCTCGCGCCATCAGCTGACTGACATGCT |
| SEQ ID NO: 1431 | GCCTCCCGTAGGAGT |
| | SEQ ID NO: 1432 |
| CTGAGACT | GCCTCCCTCGCGCCATCAGCTGAGACTCATGCT |
| SEQ ID NO: 1433 | GCCTCCCGTAGGAGT |
| | SEQ ID NO: 1434 |
| CTGAGAGA | GCCTCCCTCGCGCCATCAGCTGAGAGACATGCT |
| SEQ ID NO: 1435 | GCCTCCCGTAGGAGT |
| | SEQ ID NO: 1436 |
| CTGAGTCA | GCCTCCCTCGCGCCATCAGCTGAGTCACATGCT |
| SEQ ID NO: 1437 | GCCTCCCGTAGGAGT |
| | SEQ ID NO: 1438 |
| CTGAGTGT | GCCTCCCTCGCGCCATCAGCTGAGTGTCATGCT |
| SEQ ID NO: 1439 | GCCTCCCGTAGGAGT |
| | SEQ ID NO: 1440 |
| CTGATCAG | GCCTCCCTCGCGCCATCAGCTGATCAGCATGCT |
| SEQ ID NO: 1441 | GCCTCCCGTAGGAGT |
| | SEQ ID NO: 1142 |
| CTGATCTC | GCCTCCCTCGCGCCATCAGCTGATCTCCATGCT |
| SEQ ID NO: 1143 | GCCTCCCGTAGGAGT |
| | SEQ ID NO: 1144 |
| CTGATGAC | GCCTCCCTCGCGCCATCAGCTGATGACCATGCT |
| SEQ ID NO: 1145 | GCCTCCCGTAGGAGT |
| | SEQ ID NO: 1146 |
| CTGATGTG | GCCTCCCTCGCGCCATCAGCTGATGTGCATGCT |
| SEQ ID NO: 1147 | GCCTCCCGTAGGAGT |
| | SEQ ID NO: 1148 |
| CTGTACAG | GCCTCCCTCGCGCCATCAGCTGTACAGCATGCT |
| SEQ ID NO: 1149 | GCCTCCCGTAGGAGT |
| | SEQ ID NO: 1150 |
| CTGTACTC | GCCTCCCTCGCGCCATCAGCTGTACTCCATGCT |
| SEQ ID NO: 1151 | GCCTCCCGTAGGAGT |
| | SEQ ID NO: 1152 |
| CTGTAGAC | GCCTCCCTCGCGCCATCAGCTGTAGACCATGCT |
| SEQ ID NO: 1153 | GCCTCCCGTAGGAGT |
| | SEQ ID NO: 1154 |
| CTGTAGTG | GCCTCCCTCGCGCCATCAGCTGTAGTGCATGCT |
| SEQ ID NO: 1155 | GCCTCCCGTAGGAGT |
| | SEQ ID NO: 1156 |
| CTGTCACT | GCCTCCCTCGCGCCATCAGCTGTCACTCATGCT |
| SEQ ID NO: 1157 | GCCTCCCGTAGGAGT |
| | SEQ ID NO: 1158 |
| CTGTCAGA | GCCTCCCTCGCGCCATCAGCTGTCAGACATGCT |
| SEQ ID NO: 1159 | GCCTCCCGTAGGAGT |
| | SEQ ID NO: 1160 |
| CTGTCTCA | GCCTCCCTCGCGCCATCAGCTGTCTCACATGCT |
| SEQ ID NO: 1161 | GCCTCCCGTAGGAGT |
| | SEQ ID NO: 1162 |
| CTGTCTGT | GCCTCCCTCGCGCCATCAGCTGTCTGTCATGCT |
| SEQ ID NO: 1163 | GCCTCCCGTAGGAGT |
| | SEQ ID NO: 1164 |
| CTGTGACA | GCCTCCCTCGCGCCATCAGCTGTGACACATGCT |
| SEQ ID NO: 1165 | GCCTCCCGTAGGAGT |
| | SEQ ID NO: 1166 |
| CTGTGAGT | GCCTCCCTCGCGCCATCAGCTGTGAGTCATGCT |
| SEQ ID NO: 1167 | GCCTCCCGTAGGAGT |
| | SEQ ID NO: 1168 |
| CTGTGTCT | GCCTCCCTCGCGCCATCAGCTGTGTCTCATGCT |
| SEQ ID NO: 1169 | GCCTCCCGTAGGAGT |
| | SEQ ID NO: 1170 |
| CTGTGTGA | GCCTCCCTCGCGCCATCAGCTGTGTGACATGCT |
| SEQ ID NO: 1171 | GCCTCCCGTAGGAGT |
| | SEQ ID NO: 1172 |
| CTGTTCAC | GCCTCCCTCGCGCCATCAGCTGTTCACCATGCT |
| SEQ ID NO: 1173 | GCCTCCCGTAGGAGT |
| | SEQ ID NO: 1174 |
| CTGTTCTG | GCCTCCCTCGCGCCATCAGCTGTTCTGCATGCT |
| SEQ ID NO: 1175 | GCCTCCCGTAGGAGT |
| | SEQ ID NO: 1176 |
| CTGTTGAG | GCCTCCCTCGCGCCATCAGCTGTTGAGCATGCT |
| SEQ ID NO: 1177 | GCCTCCCGTAGGAGT |
| | SEQ ID NO: 1178 |
| CTGTTGTC | GCCTCCCTCGCGCCATCAGCTGTTGTCCATGCT |
| SEQ ID NO: 1179 | GCCTCCCGTAGGAGT |
| | SEQ ID NO: 1180 |
| CTTCACCA | GCCTCCCTCGCGCCATCAGCTTCACCACATGCT |
| SEQ ID NO: 1181 | GCCTCCCGTAGGAGT |
| | SEQ ID NO: 1182 |
| CTTCACGT | GCCTCCCTCGCGCCATCAGCTTCACGTCATGCT |
| SEQ ID NO: 1183 | GCCTCCCGTAGGAGT |
| | SEQ ID NO: 1184 |
| CTTCAGCT | GCCTCCCTCGCGCCATCAGCTTCAGCTCATGCT |
| SEQ ID NO: 1185 | GCCTCCCGTAGGAGT |
| | SEQ ID NO: 1186 |
| CTTCAGGA | GCCTCCCTCGCGCCATCAGCTTCAGGACATGCT |
| SEQ ID NO: 1187 | GCCTCCCGTAGGAGT |
| | SEQ ID NO: 1188 |
| CTTCCAAC | GCCTCCCTCGCGCCATCAGCTTCCAACCATGCT |
| SEQ ID NO: 1189 | GCCTCCCGTAGGAGT |
| | SEQ ID NO: 1190 |
| CTTCCATG | GCCTCCCTCGCGCCATCAGCTTCCATGCATGCT |
| SEQ ID NO: 1191 | GCCTCCCGTAGGAGT |
| | SEQ ID NO: 1192 |
| CTTCCTAG | GCCTCCCTCGCGCCATCAGCTTCCTAGCATGCT |
| SEQ ID NO: 1193 | GCCTCCCGTAGGAGT |
| | SEQ ID NO: 1194 |
| CTTCCTTC | GCCTCCCTCGCGCCATCAGCTTCCTTCCATGCT |
| SEQ ID NO: 1195 | GCCTCCCGTAGGAGT |
| | SEQ ID NO: 1196 |
| CTTCGAAG | GCCTCCCTCGCGCCATCAGCTTCGAAGCATGCT |
| SEQ ID NO: 1197 | GCCTCCCGTAGGAGT |
| | SEQ ID NO: 1198 |
| CTTCGATC | GCCTCCCTCGCGCCATCAGCTTCGATCCATGCT |
| SEQ ID NO: 1199 | GCCTCCCGTAGGAGT |
| | SEQ ID NO: 1200 |
| CTTCGTAC | GCCTCCCTCGCGCCATCAGCTTCGTACCATGCT |
| SEQ ID NO: 1201 | GCCTCCCGTAGGAGT |
| | SEQ ID NO: 1202 |
| CTTCGTTG | GCCTCCCTCGCGCCATCAGCTTCGTTGCATGCT |
| SEQ ID NO: 1203 | GCCTCCCGTAGGAGT |
| | SEQ ID NO: 1204 |
| CTTCTCCT | GCCTCCCTCGCGCCATCAGCTTCTCCTCATGCT |
| SEQ ID NO: 1205 | GCCTCCCGTAGGAGT |
| | SEQ ID NO: 1206 |
| CTTCTCGA | GCCTCCCTCGCGCCATCAGCTTCTCGACATGCT |
| SEQ ID NO: 1207 | GCCTCCCGTAGGAGT |
| | SEQ ID NO: 1208 |
| CTTCTGCA | GCCTCCCTCGCGCCATCAGCTTCTGCACATGCT |
| SEQ ID NO: 1209 | GCCTCCCGTAGGAGT |
| | SEQ ID NO: 1210 |
| CTTCTGGT | GCCTCCCTCGCGCCATCAGCTTCTGGTCATGCT |
| SEQ ID NO: 1211 | GCCTCCCGTAGGAGT |
| | SEQ ID NO: 1212 |
| CTTGACCT | GCCTCCCTCGCGCCATCAGCTTGACCTCATGCT |
| SEQ ID NO: 1213 | GCCTCCCGTAGGAGT |
| | SEQ ID NO: 1214 |
| CTTGACGA | GCCTCCCTCGCGCCATCAGCTTGACGACATGCT |
| SEQ ID NO: 1215 | GCCTCCCGTAGGAGT |
| | SEQ ID NO: 1216 |
| CTTGAGCA | GCCTCCCTCGCGCCATCAGCTTGAGCACATGCT |
| SEQ ID NO: 1217 | GCCTCCCGTAGGAGT |
| | SEQ ID NO: 1218 |
| CTTGAGGT | GCCTCCCTCGCGCCATCAGCTTGAGGTCATGCT |
| SEQ ID NO: 1219 | GCCTCCCGTAGGAGT |
| | SEQ ID NO: 1220 |
| CTTGCAAG | GCCTCCCTCGCGCCATCAGCTTGCAAGCATGCT |
| SEQ ID NO: 1221 | GCCTCCCGTAGGAGT |
| | SEQ ID NO: 1222 |
| CTTGCATC | GCCTCCCTCGCGCCATCAGCTTGCATCCATGCT |
| SEQ ID NO: 1223 | GCCTCCCGTAGGAGT |
| | SEQ ID NO: 1224 |
| CTTGCTAC | GCCTCCCTCGCGCCATCAGCTTGCTACCATGCT |
| SEQ ID NO: 1225 | GCCTCCCGTAGGAGT |
| | SEQ ID NO: 1226 |
| CTTGCTTG | GCCTCCCTCGCGCCATCAGCTTGCTTGCATGCT |
| SEQ ID NO: 1227 | GCCTCCCGTAGGAGT |
| | SEQ ID NO: 1228 |
| CTTGGAAC | GCCTCCCTCGCGCCATCAGCTTGGAACCATGCT |
| SEQ ID NO: 1229 | GCCTCCCGTAGGAGT |
| | SEQ ID NO: 1230 |
| CTTGGATG | GCCTCCCTCGCGCCATCAGCTTGGATGCATGCT |
| SEQ ID NO: 1231 | GCCTCCCGTAGGAGT |
| | SEQ ID NO: 1232 |
| CTTGGTAG | GCCTCCCTCGCGCCATCAGCTTGGTAGCATGCT |
| SEQ ID NO: 1233 | GCCTCCCGTAGGAGT |
| | SEQ ID NO: 1234 |
| CTTGGTTC | GCCTCCCTCGCGCCATCAGCTTGGTTCCATGCT |
| SEQ ID NO: 1235 | GCCTCCCGTAGGAGT |
| | SEQ ID NO: 1236 |
| CTTGTCCA | GCCTCCCTCGCGCCATCAGCTTGTCCACATGCT |
| SEQ ID NO: 1237 | GCCTCCCGTAGGAGT |
| | SEQ ID NO: 1238 |
| CTTGTCGT | GCCTCCCTCGCGCCATCAGCTTGTCGTCATGCT |
| SEQ ID NO: 1239 | GCCTCCCGTAGGAGT |
| | SEQ ID NO: 1240 |
| CTTGTGCT | GCCTCCCTCGCGCCATCAGCTTGTGCTCATGCT |
| SEQ ID NO: 1241 | GCCTCCCGTAGGAGT |
| | SEQ ID NO: 1242 |
| CTTGTGGA | GCCTCCCTCGCGCCATCAGCTTGTGGACATGCT |
| SEQ ID NO: 1243 | GCCTCCCGTAGGAGT |
| | SEQ ID NO: 1244 |
| GAACACCT | GCCTCCCTCGCGCCATCAGGAACACCTCATGCT |
| SEQ ID NO: 1245 | GCCTCCCGTAGGAGT |
| | SEQ ID NO: 1246 |
| GAACACGA | GCCTCCCTCGCGCCATCAGGAACACGACATGCT |
| SEQ ID NO: 1247 | GCCTCCCGTAGGAGT |
| | SEQ ID NO: 1248 |
| GAACAGCA | GCCTCCCTCGCGCCATCAGGAACAGCACATGCT |
| SEQ ID NO: 1249 | GCCTCCCGTAGGAGT |
| | SEQ ID NO: 1250 |
| GAACAGGT | GCCTCCCTCGCGCCATCAGGAACAGGTCATGCT |
| SEQ ID NO: 1251 | GCCTCCCGTAGGAGT |
| | SEQ ID NO: 1252 |
| GAACCAAG | GCCTCCCTCGCGCCATCAGGAACCAAGCATGCT |
| SEQ ID NO: 1253 | GCCTCCCGTAGGAGT |
| | SEQ ID NO: 1254 |
| GAACCATC | GCCTCCCTCGCGCCATCAGGAACCATCCATGCT |
| SEQ ID NO: 1255 | GCCTCCCGTAGGAGT |
| | SEQ ID NO: 1256 |
| GAACCTAC | GCCTCCCTCGCGCCATCAGGAACCTACCATGCT |
| SEQ ID NO: 1257 | GCCTCCCGTAGGAGT |
| | SEQ ID NO: 1258 |
| GAACCTTG | GCCTCCCTCGCGCCATCAGGAACCTTGCATGCT |
| SEQ ID NO: 1259 | GCCTCCCGTAGGAGT |
| | SEQ ID NO: 1260 |
| GAACGAAC | GCCTCCCTCGCGCCATCAGGAACGAACCATGCT |
| SEQ ID NO: 1261 | GCCTCCCGTAGGAGT |
| | SEQ ID NO: 1262 |
| GAACGATG | GCCTCCCTCGCGCCATCAGGAACGATGCATGCT |
| SEQ ID NO: 1263 | GCCTCCCGTAGGAGT |
| | SEQ ID NO: 1264 |
| GAACGTAG | GCCTCCCTCGCGCCATCAGGAACGTAGCATGCT |
| SEQ ID NO: 1265 | GCCTCCCGTAGGAGT |
| | SEQ ID NO: 1266 |
| GAACGTTC | GCCTCCCTCGCGCCATCAGGAACGTTCCATGCT |
| SEQ ID NO: 1267 | GCCTCCCGTAGGAGT |
| | SEQ ID NO: 1268 |
| GAACTCCA | GCCTCCCTCGCGCCATCAGGAACTCCACATGCT |
| SEQ ID NO: 1269 | GCCTCCCGTAGGAGT |
| | SEQ ID NO: 1270 |
| GAACTCGT | GCCTCCCTCGCGCCATCAGGAACTCGTCATGCT |
| SEQ ID NO: 1271 | GCCTCCCGTAGGAGT |
| | SEQ ID NO: 1272 |
| GAACTGCT | GCCTCCCTCGCGCCATCAGGAACTGCTCATGCT |
| SEQ ID NO: 1273 | GCCTCCCGTAGGAGT |
| | SEQ ID NO: 1274 |
| GAACTGGA | GCCTCCCTCGCGCCATCAGGAACTGGACATGCT |
| SEQ ID NO: 1275 | GCCTCCCGTAGGAGT |
| | SEQ ID NO: 1276 |
| GAAGACCA | GCCTCCCTCGCGCCATCAGGAAGACCACATGCT |
| SEQ ID NO: 1277 | GCCTCCCGTAGGAGT |
| | SEQ ID NO: 1278 |
| GAAGACGT | GCCTCCCTCGCGCCATCAGGAAGACGTCATGCT |
| SEQ ID NO: 1279 | GCCTCCCGTAGGAGT |
| | SEQ ID NO: 1280 |
| GAAGAGCT | GCCTCCCTCGCGCCATCAGGAAGAGCTCATGCT |
| SEQ ID NO: 1281 | GCCTCCCGTAGGAGT |
| | SEQ ID NO: 1282 |
| GAAGAGGA | GCCTCCCTCGCGCCATCAGGAAGAGGACATGCT |
| SEQ ID NO: 1283 | GCCTCCCGTAGGAGT |
| | SEQ ID NO: 1284 |
| GAAGCAAC | GCCTCCCTCGCGCCATCAGGAAGCAACCATGCT |
| SEQ ID NO: 1285 | GCCTCCCGTAGGAGT |
| | SEQ ID NO: 1286 |
| GAAGCATG | GCCTCCCTCGCGCCATCAGGAAGCATGCATGCT |
| SEQ ID NO: 1287 | GCCTCCCGTAGGAGT |
| | SEQ ID NO: 1288 |
| GAAGCTAG | GCCTCCCTCGCGCCATCAGGAAGCTAGCATGCT |
| SEQ ID NO: 1289 | GCCTCCCGTAGGAGT |
| | SEQ ID NO: 1290 |
| GAAGCTTC | GCCTCCCTCGCGCCATCAGGAAGCTTCCATGCT |
| SEQ ID NO: 1291 | GCCTCCCGTAGGAGT |
| | SEQ ID NO: 1292 |
| GAAGGAAG | GCCTCCCTCGCGCCATCAGGAAGGAAGCATGCT |
| SEQ ID NO: 1293 | GCCTCCCGTAGGAGT |
| | SEQ ID NO: 1294 |
| GAAGGATC | GCCTCCCTCGCGCCATCAGGAAGGATCCATGCT |
| SEQ ID NO: 1295 | GCCTCCCGTAGGAGT |
| | SEQ ID NO: 1296 |
| GAAGGTAC | GCCTCCCTCGCGCCATCAGGAAGGTACCATGCT |
| SEQ ID NO: 1297 | GCCTCCCGTAGGAGT |
| | SEQ ID NO: 1298 |
| GAAGGTTG | GCCTCCCTCGCGCCATCAGGAAGGTTGCATGCT |
| SEQ ID NO: 1299 | GCCTCCCGTAGGAGT |
| | SEQ ID NO: 1300 |
| GAAGTCCT | GCCTCCCTCGCGCCATCAGGAAGTCCTCATGCT |
| SEQ ID NO: 1301 | GCCTCCCGTAGGAGT |
| | SEQ ID NO: 1302 |
| GAAGTCGA | GCCTCCCTCGCGCCATCAGGAAGTCGACATGCT |
| SEQ ID NO: 1303 | GCCTCCCGTAGGAGT |
| | SEQ ID NO: 1304 |
| GAAGTGCA | GCCTCCCTCGCGCCATCAGGAAGTGCACATGCT |
| SEQ ID NO: 1305 | GCCTCCCGTAGGAGT |
| | SEQ ID NO: 1306 |
| GAAGTGGT | GCCTCCCTCGCGCCATCAGGAAGTGGTCATGCT |
| SEQ ID NO: 1307 | GCCTCCCGTAGGAGT |
| | SEQ ID NO: 1308 |
| GACAACAG | GCCTCCCTCGCGCCATCAGGACAACAGCATGCT |
| SEQ ID NO: 1309 | GCCTCCCGTAGGAGT |
| | SEQ ID NO: 1310 |
| GACAACTC | GCCTCCCTCGCGCCATCAGGACAACTCCATGCT |
| SEQ ID NO: 1311 | GCCTCCCGTAGGAGT |
| | SEQ ID NO: 1312 |
| GACAAGAC | GCCTCCCTCGCGCCATCAGGACAAGACCATGCT |
| SEQ ID NO: 1313 | GCCTCCCGTAGGAGT |
| | SEQ ID NO: 1314 |
| GACAAGTG | GCCTCCCTCGCGCCATCAGGACAAGTGCATGCT |
| SEQ ID NO: 1315 | GCCTCCCGTAGGAGT |
| | SEQ ID NO: 1316 |
| GACACACT | GCCTCCCTCGCGCCATCAGGACACACTCATGCT |
| SEQ ID NO: 1317 | GCCTCCCGTAGGAGT |
| | SEQ ID NO: 1318 |
| GACACAGA | GCCTCCCTCGCGCCATCAGGACACAGACATGCT |
| SEQ ID NO: 1319 | GCCTCCCGTAGGAGT |
| | SEQ ID NO: 1320 |
| GACACTCA | GCCTCCCTCGCGCCATCAGGACACTCACATGCT |
| SEQ ID NO: 1321 | GCCTCCCGTAGGAGT |
| | SEQ ID NO: 1322 |
| GACACTGT | GCCTCCCTCGCGCCATCAGGACACTGTCATGCT |
| SEQ ID NO: 1323 | GCCTCCCGTAGGAGT |
| | SEQ ID NO: 1324 |
| GACAGACA | GCCTCCCTCGCGCCATCAGGACAGACACATGCT |
| SEQ ID NO: 1325 | GCCTCCCGTAGGAGT |
| | SEQ ID NO: 1326 |
| GACAGAGT | GCCTCCCTCGCGCCATCAGGACAGAGTCATGCT |
| SEQ ID NO: 1327 | GCCTCCCGTAGGAGT |
| | SEQ ID NO: 1328 |
| GACAGTCT | GCCTCCCTCGCGCCATCAGGACAGTCTCATGCT |
| SEQ ID NO: 1329 | GCCTCCCGTAGGAGT |
| | SEQ ID NO: 1330 |
| GACAGTGA | GCCTCCCTCGCGCCATCAGGACAGTGACATGCT |
| SEQ ID NO: 1331 | GCCTCCCGTAGGAGT |
| | SEQ ID NO: 1332 |
| GACATCAC | GCCTCCCTCGCGCCATCAGGACATCACCATGCT |
| SEQ ID NO: 1333 | GCCTCCCGTAGGAGT |
| | SEQ ID NO: 1334 |
| GACATCTG | GCCTCCCTCGCGCCATCAGGACATCTGCATGCT |
| SEQ ID NO: 1335 | GCCTCCCGTAGGAGT |
| | SEQ ID NO: 1336 |
| GACATGAG | GCCTCCCTCGCGCCATCAGGACATGAGCATGCT |
| SEQ ID NO: 1337 | GCCTCCCGTAGGAGT |
| | SEQ ID NO: 1338 |
| GACATGTC | GCCTCCCTCGCGCCATCAGGACATGTCCATGCT |
| SEQ ID NO: 1339 | GCCTCCCGTAGGAGT |
| | SEQ ID NO: 1340 |
| GACTACAC | GCCTCCCTCGCGCCATCAGGACTACACCATGCT |
| SEQ ID NO: 1341 | GCCTCCCGTAGGAGT |
| | SEQ ID NO: 1342 |
| GACTACTG | GCCTCCCTCGCGCCATCAGGACTACTGCATGCT |
| SEQ ID NO: 1343 | GCCTCCCGTAGGAGT |
| | SEQ ID NO: 1344 |
| GACTAGAG | GCCTCCCTCGCGCCATCAGGACTAGAGCATGCT |
| SEQ ID NO: 1345 | GCCTCCCGTAGGAGT |
| | SEQ ID NO: 1346 |
| GACTAGTC | GCCTCCCTCGCGCCATCAGGACTAGTCCATGCT |
| SEQ ID NO: 1347 | GCCTCCCGTAGGAGT |
| | SEQ ID NO: 1348 |
| GACTCACA | GCCTCCCTCGCGCCATCAGGACTCACACATGCT |
| SEQ ID NO: 1349 | GCCTCCCGTAGGAGT |
| | SEQ ID NO: 1350 |
| GACTCAGT | GCCTCCCTCGCGCCATCAGGACTCAGTCATGCT |
| SEQ ID NO: 1351 | GCCTCCCGTAGGAGT |
| | SEQ ID NO: 1352 |
| GACTCTCT | GCCTCCCTCGCGCCATCAGGACTCTCTCATGCT |
| SEQ ID NO: 1353 | GCCTCCCGTAGGAGT |
| | SEQ ID NO: 1354 |
| GACTCTGA | GCCTCCCTCGCGCCATCAGGACTCTGACATGCT |
| SEQ ID NO: 1355 | GCCTCCCGTAGGAGT |
| | SEQ ID NO: 1356 |
| GACTGACT | GCCTCCCTCGCGCCATCAGGACTGACTCATGCT |
| SEQ ID NO: 1357 | GCCTCCCGTAGGAGT |
| | SEQ ID NO: 1358 |
| GACTGAGA | GCCTCCCTCGCGCCATCAGGACTGAGACATGCT |
| SEQ ID NO: 1359 | GCCTCCCGTAGGAGT |
| | SEQ ID NO: 1360 |
| GACTGTCA | GCCTCCCTCGCGCCATCAGGACTGTCACATGCT |
| SEQ ID NO: 1361 | GCCTCCCGTAGGAGT |
| | SEQ ID NO: 1362 |
| GACTGTGT | GCCTCCCTCGCGCCATCAGGACTGTGTCATGCT |
| SEQ ID NO: 1363 | GCCTCCCGTAGGAGT |
| | SEQ ID NO: 1364 |
| GACTTCAG | GCCTCCCTCGCGCCATCAGGACTTCAGCATGCT |
| SEQ ID NO: 1365 | GCCTCCCGTAGGAGT |
| | SEQ ID NO: 1366 |
| GACTTCTC | GCCTCCCTCGCGCCATCAGGACTTCTCCATGCT |
| SEQ ID NO: 1367 | GCCTCCCGTAGGAGT |
| | SEQ ID NO: 1368 |
| GACTTGAC | GCCTCCCTCGCGCCATCAGGACTTGACCATGCT |
| SEQ ID NO: 1369 | GCCTCCCGTAGGAGT |
| | SEQ ID NO: 1370 |
| GACTTGTG | GCCTCCCTCGCGCCATCAGGACTTGTGCATGCT |
| SEQ ID NO: 1371 | GCCTCCCGTAGGAGT |
| | SEQ ID NO: 1372 |
| GAGAACAC | GCCTCCCTCGCGCCATCAGGAGAACACCATGCT |
| SEQ ID NO: 1373 | GCCTCCCGTAGGAGT |
| | SEQ ID NO: 1374 |
| GAGAACTG | GCCTCCCTCGCGCCATCAGGAGAACTGCATGCT |
| SEQ ID NO: 1375 | GCCTCCCGTAGGAGT |
| | SEQ ID NO: 1376 |
| GAGAAGAG | GCCTCCCTCGCGCCATCAGGAGAAGAGCATGCT |
| SEQ ID NO: 1377 | GCCTCCCGTAGGAGT |
| | SEQ ID NO: 1378 |
| GAGAAGTC | GCCTCCCTCGCGCCATCAGGAGAAGTCCATGCT |
| SEQ ID NO: 1379 | GCCTCCCGTAGGAGT |
| | SEQ ID NO: 1380 |
| GAGACACA | GCCTCCCTCGCGCCATCAGGAGACACACATGCT |
| SEQ ID NO: 1381 | GCCTCCCGTAGGAGT |
| | SEQ ID NO: 1382 |
| GAGACAGT | GCCTCCCTCGCGCCATCAGGAGACAGTCATGCT |
| SEQ ID NO: 1383 | GCCTCCCGTAGGAGT |
| | SEQ ID NO: 1384 |
| GAGACTCT | GCCTCCCTCGCGCCATCAGGAGACTCTCATGCT |
| SEQ ID NO: 1385 | GCCTCCCGTAGGAGT |
| | SEQ ID NO: 1386 |
| GAGACTGA | GCCTCCCTCGCGCCATCAGGAGACTGACATGCT |
| SEQ ID NO: 1387 | GCCTCCCGTAGGAGT |
| | SEQ ID NO: 1388 |
| GAGAGACT | GCCTCCCTCGCGCCATCAGGAGAGACTCATGCT |
| SEQ ID NO: 1389 | GCCTCCCGTAGGAGT |
| | SEQ ID NO: 1390 |
| GAGAGAGA | GCCTCCCTCGCGCCATCAGGAGAGAGACATGCT |
| SEQ ID NO: 1391 | GCCTCCCGTAGGAGT |
| | SEQ ID NO: 1392 |
| GAGAGTCA | GCCTCCCTCGCGCCATCAGGAGAGTCACATGCT |
| SEQ ID NO: 1393 | GCCTCCCGTAGGAGT |
| | SEQ ID NO: 1394 |
| GAGAGTGT | GCCTCCCTCGCGCCATCAGGAGAGTGTCATGCT |
| SEQ ID NO: 1395 | GCCTCCCGTAGGAGT |
| | SEQ ID NO: 1396 |
| GAGATCAG | GCCTCCCTCGCGCCATCAGGAGATCAGCATGCT |
| SEQ ID NO: 1397 | GCCTCCCGTAGGAGT |
| | SEQ ID NO: 1398 |
| GAGATCTC | GCCTCCCTCGCGCCATCAGGAGATCTCCATGCT |
| SEQ ID NO: 1399 | GCCTCCCGTAGGAGT |
| | SEQ ID NO: 1400 |
| GAGATGAC | GCCTCCCTCGCGCCATCAGGAGATGACCATGCT |
| SEQ ID NO: 1401 | GCCTCCCGTAGGAGT |
| | SEQ ID NO: 1402 |
| GAGATGTG | GCCTCCCTCGCGCCATCAGGAGATGTGCATGCT |
| SEQ ID NO: 1403 | GCCTCCCGTAGGAGT |
| | SEQ ID NO: 1404 |
| GAGTACAG | GCCTCCCTCGCGCCATCAGGAGTACAGCATGCT |
| SEQ ID NO: 1405 | GCCTCCCGTAGGAGT |
| | SEQ ID NO: 1406 |
| GAGTACTC | GCCTCCCTCGCGCCATCAGGAGTACTCCATGCT |
| SEQ ID NO: 1407 | GCCTCCCGTAGGAGT |
| | SEQ ID NO: 1408 |
| GAGTAGAC | GCCTCCCTCGCGCCATCAGGAGTAGACCATGCT |
| SEQ ID NO: 1409 | GCCTCCCGTAGGAGT |
| | SEQ ID NO: 1410 |
| GAGTAGTG | GCCTCCCTCGCGCCATCAGGAGTAGTGCATGCT |
| SEQ ID NO: 1411 | GCCTCCCGTAGGAGT |
| | SEQ ID NO: 1412 |
| GAGTCACT | GCCTCCCTCGCGCCATCAGGAGTCACTCATGCT |
| SEQ ID NO: 1413 | GCCTCCCGTAGGAGT |
| | SEQ ID NO: 1414 |
| GAGTCAGA | GCCTCCCTCGCGCCATCAGGAGTCAGACATGCT |
| SEQ ID NO: 1415 | GCCTCCCGTAGGAGT |
| | SEQ ID NO: 1416 |
| GAGTCTCA | GCCTCCCTCGCGCCATCAGGAGTCTCACATGCT |
| SEQ ID NO: 1417 | GCCTCCCGTAGGAGT |
| | SEQ ID NO: 1418 |
| GAGTCTGT | GCCTCCCTCGCGCCATCAGGAGTCTGTCATGCT |
| SEQ ID NO: 1419 | GCCTCCCGTAGGAGT |
| | SEQ ID NO: 1420 |
| GAGTGACA | GCCTCCCTCGCGCCATCAGGAGTGACACATGCT |
| SEQ ID NO: 1421 | GCCTCCCGTAGGAGT |
| | SEQ ID NO: 1422 |
| GAGTGAGT | GCCTCCCTCGCGCCATCAGGAGTGAGTCATGCT |
| SEQ ID NO: 1423 | GCCTCCCGTAGGAGT |
| | SEQ ID NO: 1424 |
| GAGTGTCT | GCCTCCCTCGCGCCATCAGGAGTGTCTCATGCT |
| SEQ ID NO: 1425 | GCCTCCCGTAGGAGT |
| | SEQ ID NO: 1426 |
| GAGTGTGA | GCCTCCCTCGCGCCATCAGGAGTGTGACATGCT |
| SEQ ID NO: 1427 | GCCTCCCGTAGGAGT |
| | SEQ ID NO: 1428 |
| GAGTTCAC | GCCTCCCTCGCGCCATCAGGAGTTCACCATGCT |
| SEQ ID NO: 1429 | GCCTCCCGTAGGAGT |
| | SEQ ID NO: 1430 |
| GAGTTCTG | GCCTCCCTCGCGCCATCAGGAGTTCTGCATGCT |
| SEQ ID NO: 1431 | GCCTCCCGTAGGAGT |
| | SEQ ID NO: 1432 |
| GAGTTGAG | GCCTCCCTCGCGCCATCAGGAGTTGAGCATGCT |
| SEQ ID NO: 1433 | GCCTCCCGTAGGAGT |
| | SEQ ID NO: 1434 |
| GAGTTGTC | GCCTCCCTCGCGCCATCAGGAGTTGTCCATGCT |
| SEQ ID NO: 1435 | GCCTCCCGTAGGAGT |
| | SEQ ID NO: 1436 |
| GATCACCA | GCCTCCCTCGCGCCATCAGGATCACCACATGCT |
| SEQ ID NO: 1437 | GCCTCCCGTAGGAGT |
| | SEQ ID NO: 1438 |
| GATCACGT | GCCTCCCTCGCGCCATCAGGATCACGTCATGCT |
| SEQ ID NO: 1439 | GCCTCCCGTAGGAGT |
| | SEQ ID NO: 1440 |
| GATCAGCT | GCCTCCCTCGCGCCATCAGGATCAGCTCATGCT |
| SEQ ID NO: 1441 | GCCTCCCGTAGGAGT |
| | SEQ ID NO: 1442 |
| GATCAGGA | GCCTCCCTCGCGCCATCAGGATCAGGACATGCT |
| SEQ ID NO: 1443 | GCCTCCCGTAGGAGT |
| | SEQ ID NO: 1444 |
| GATCCAAC | GCCTCCCTCGCGCCATCAGGATCCAACCATGCT |
| SEQ ID NO: 1445 | GCCTCCCGTAGGAGT |
| | SEQ ID NO: 1446 |
| GATCCATG | GCCTCCCTCGCGCCATCAGGATCCATGCATGCT |
| SEQ ID NO: 1447 | GCCTCCCGTAGGAGT |
| | SEQ ID NO: 1448 |
| GATCCTAG | GCCTCCCTCGCGCCATCAGGATCCTAGCATGCT |
| SEQ ID NO: 1449 | GCCTCCCGTAGGAGT |
| | SEQ ID NO: 1450 |
| GATCCTTC | GCCTCCCTCGCGCCATCAGGATCCTTCCATGCT |
| SEQ ID NO: 1451 | GCCTCCCGTAGGAGT |
| | SEQ ID NO: 1452 |
| GATCGAAG | GCCTCCCTCGCGCCATCAGGATCGAAGCATGCT |
| SEQ ID NO: 1453 | GCCTCCCGTAGGAGT |
| | SEQ ID NO: 1454 |
| GATCGATC | GCCTCCCTCGCGCCATCAGGATCGATCCATGCT |
| SEQ ID NO: 1455 | GCCTCCCGTAGGAGT |
| | SEQ ID NO: 1456 |
| GATCGTAC | GCCTCCCTCGCGCCATCAGGATCGTACCATGCT |
| SEQ ID NO: 1457 | GCCTCCCGTAGGAGT |
| | SEQ ID NO: 1458 |
| GATCGTTG | GCCTCCCTCGCGCCATCAGGATCGTTGCATGCT |
| SEQ ID NO: 1459 | GCCTCCCGTAGGAGT |
| | SEQ ID NO: 1460 |
| GATCTCCT | GCCTCCCTCGCGCCATCAGGATCTCCTCATGCT |
| SEQ ID NO: 1461 | GCCTCCCGTAGGAGT |
| | SEQ ID NO: 1462 |
| GATCTCGA | GCCTCCCTCGCGCCATCAGGATCTCGACATGCT |
| SEQ ID NO: 1463 | GCCTCCCGTAGGAGT |
| | SEQ ID NO: 1464 |
| GATCTGCA | GCCTCCCTCGCGCCATCAGGATCTGCACATGCT |
| SEQ ID NO: 1465 | GCCTCCCGTAGGAGT |
| | SEQ ID NO: 1466 |
| GATCTGGT | GCCTCCCTCGCGCCATCAGGATCTGGTCATGCT |
| SEQ ID NO: 1467 | GCCTCCCGTAGGAGT |
| | SEQ ID NO: 1468 |
| GATGACCT | GCCTCCCTCGCGCCATCAGGATGACCTCATGCT |
| SEQ ID NO: 1469 | GCCTCCCGTAGGAGT |
| | SEQ ID NO: 1470 |
| GATGACGA | GCCTCCCTCGCGCCATCAGGATGACGACATGCT |
| SEQ ID NO: 1471 | GCCTCCCGTAGGAGT |
| | SEQ ID NO: 1472 |
| GATGAGCA | GCCTCCCTCGCGCCATCAGGATGAGCACATGCT |
| SEQ ID NO: 1473 | GCCTCCCGTAGGAGT |
| | SEQ ID NO: 1474 |
| GATGAGGT | GCCTCCCTCGCGCCATCAGGATGAGGTCATGCT |
| SEQ ID NO: 1475 | GCCTCCCGTAGGAGT |
| | SEQ ID NO: 1476 |
| GATGCAAG | GCCTCCCTCGCGCCATCAGGATGCAAGCATGCT |
| SEQ ID NO: 1477 | GCCTCCCGTAGGAGT |
| | SEQ ID NO: 1478 |
| GATGCATC | GCCTCCCTCGCGCCATCAGGATGCATCCATGCT |
| SEQ ID NO: 1479 | GCCTCCCGTAGGAGT |
| | SEQ ID NO: 1480 |
| GATGCTAC | GCCTCCCTCGCGCCATCAGGATGCTACCATGCT |
| SEQ ID NO: 1481 | GCCTCCCGTAGGAGT |
| | SEQ ID NO: 1482 |
| GATGCTTG | GCCTCCCTCGCGCCATCAGGATGCTTGCATGCT |
| SEQ ID NO: 1483 | GCCTCCCGTAGGAGT |
| | SEQ ID NO: 1484 |
| GATGGAAC | GCCTCCCTCGCGCCATCAGGATGGAACCATGCT |
| SEQ ID NO: 1485 | GCCTCCCGTAGGAGT |
| | SEQ ID NO: 1486 |
| GATGGATG | GCCTCCCTCGCGCCATCAGGATGGATGCATGCT |
| SEQ ID NO: 1487 | GCCTCCCGTAGGAGT |
| | SEQ ID NO: 1488 |
| GATGGTAG | GCCTCCCTCGCGCCATCAGGATGGTAGCATGCT |
| SEQ ID NO: 1489 | GCCTCCCGTAGGAGT |
| | SEQ ID NO: 1490 |
| GATGGTTC | GCCTCCCTCGCGCCATCAGGATGGTTCCATGCT |
| SEQ ID NO: 1491 | GCCTCCCGTAGGAGT |
| | SEQ ID NO: 1492 |
| GATGTCCA | GCCTCCCTCGCGCCATCAGGATGTCCACATGCT |
| SEQ ID NO: 1493 | GCCTCCCGTAGGAGT |
| | SEQ ID NO: 1494 |
| GATGTCGT | GCCTCCCTCGCGCCATCAGGATGTCGTCATGCT |
| SEQ ID NO: 1495 | GCCTCCCGTAGGAGT |
| | SEQ ID NO: 1496 |
| GATGTGCT | GCCTCCCTCGCGCCATCAGGATGTGCTCATGCT |
| SEQ ID NO: 1497 | GCCTCCCGTAGGAGT |
| | SEQ ID NO: 1498 |
| GATGTGGA | GCCTCCCTCGCGCCATCAGGATGTGGACATGCT |
| SEQ ID NO: 1499 | GCCTCCCGTAGGAGT |
| | SEQ ID NO: 1500 |
| GCAACCAT | GCCTCCCTCGCGCCATCAGGCAACCATCATGCT |
| SEQ ID NO: 1501 | GCCTCCCGTAGGAGT |
| | SEQ ID NO: 1502 |
| GCAACCTA | GCCTCCCTCGCGCCATCAGGCAACCTACATGCT |
| SEQ ID NO: 1503 | GCCTCCCGTAGGAGT |
| | SEQ ID NO: 1504 |
| GCAACGAA | GCCTCCCTCGCGCCATCAGGCAACGAACATGCT |
| SEQ ID NO: 1505 | GCCTCCCGTAGGAGT |
| | SEQ ID NO: 1506 |
| GCAACGTT | GCCTCCCTCGCGCCATCAGGCAACGTTCATGCT |
| SEQ ID NO: 1507 | GCCTCCCGTAGGAGT |
| | SEQ ID NO: 1508 |
| GCAAGCAA | GCCTCCCTCGCGCCATCAGGCAAGCAACATGCT |
| SEQ ID NO: 1509 | GCCTCCCGTAGGAGT |
| | SEQ ID NO: 1510 |
| GCAAGCTT | GCCTCCCTCGCGCCATCAGGCAAGCTTCATGCT |
| SEQ ID NO: 1511 | GCCTCCCGTAGGAGT |
| | SEQ ID NO: 1512 |
| GCAAGGAT | GCCTCCCTCGCGCCATCAGGCAAGGATCATGCT |
| SEQ ID NO: 1513 | GCCTCCCGTAGGAGT |
| | SEQ ID NO: 1514 |
| GCAAGGTA | GCCTCCCTCGCGCCATCAGGCAAGGTACATGCT |
| SEQ ID NO: 1515 | GCCTCCCGTAGGAGT |
| | SEQ ID NO: 1516 |
| GCAATACC | GCCTCCCTCGCGCCATCAGGCAATACCCATGCT |
| SEQ ID NO: 1517 | GCCTCCCGTAGGAGT |
| | SEQ ID NO: 1518 |
| GCAATAGG | GCCTCCCTCGCGCCATCAGGCAATAGGCATGCT |
| SEQ ID NO: 1519 | GCCTCCCGTAGGAGT |
| | SEQ ID NO: 1520 |
| GCAATTCG | GCCTCCCTCGCGCCATCAGGCAATTCGCATGCT |
| SEQ ID NO: 1521 | GCCTCCCGTAGGAGT |
| | SEQ ID NO: 1522 |
| GCAATTGC | GCCTCCCTCGCGCCATCAGGCAATTGCCATGCT |
| SEQ ID NO: 1523 | GCCTCCCGTAGGAGT |
| | SEQ ID NO: 1524 |
| GCATAACC | GCCTCCCTCGCGCCATCAGGCATAACCCATGCT |
| SEQ ID NO: 1525 | GCCTCCCGTAGGAGT |
| | SEQ ID NO: 1526 |
| GCATAAGG | GCCTCCCTCGCGCCATCAGGCATAAGGCATGCT |
| SEQ ID NO: 1527 | GCCTCCCGTAGGAGT |
| | SEQ ID NO: 1528 |
| GCATATCG | GCCTCCCTCGCGCCATCAGGCATATCGCATGCT |
| SEQ ID NO: 1529 | GCCTCCCGTAGGAGT |
| | SEQ ID NO: 1530 |
| GCATATGC | GCCTCCCTCGCGCCATCAGGCATATGCCATGCT |
| SEQ ID NO: 1531 | GCCTCCCGTAGGAGT |
| | SEQ ID NO: 1532 |
| GCATCCAA | GCCTCCCTCGCGCCATCAGGCATCCAACATGCT |
| SEQ ID NO: 1533 | GCCTCCCGTAGGAGT |
| | SEQ ID NO: 1534 |
| GCATCCTT | GCCTCCCTCGCGCCATCAGGCATCCTTCATGCT |
| SEQ ID NO: 1535 | GCCTCCCGTAGGAGT |
| | SEQ ID NO: 1536 |
| GCATCGAT | GCCTCCCTCGCGCCATCAGGCATCGATCATGCT |
| SEQ ID NO: 1537 | GCCTCCCGTAGGAGT |
| | SEQ ID NO: 1538 |
| GCATCGTA | GCCTCCCTCGCGCCATCAGGCATCGTACATGCT |
| SEQ ID NO: 1539 | GCCTCCCGTAGGAGT |
| | SEQ ID NO: 1540 |
| GCATGCAT | GCCTCCCTCGCGCCATCAGGCATGCATCATGCT |
| SEQ ID NO: 1541 | GCCTCCCGTAGGAGT |
| | SEQ ID NO: 1542 |
| GCATGCTA | GCCTCCCTCGCGCCATCAGGCATGCTACATGCT |
| SEQ ID NO: 1543 | GCCTCCCGTAGGAGT |
| | SEQ ID NO: 1544 |
| GCATGGAA | GCCTCCCTCGCGCCATCAGGCATGGAACATGCT |
| SEQ ID NO: 1545 | GCCTCCCGTAGGAGT |
| | SEQ ID NO: 1546 |
| GCATGGTT | GCCTCCCTCGCGCCATCAGGCATGGTTCATGCT |
| SEQ ID NO: 1547 | GCCTCCCGTAGGAGT |
| | SEQ ID NO: 1548 |
| GCATTACG | GCCTCCCTCGCGCCATCAGGCATTACGCATGCT |
| SEQ ID NO: 1549 | GCCTCCCGTAGGAGT |
| | SEQ ID NO: 1550 |
| GCATTAGC | GCCTCCCTCGCGCCATCAGGCATTAGCCATGCT |
| SEQ ID NO: 1551 | GCCTCCCGTAGGAGT |
| | SEQ ID NO: 1552 |
| GCCGAATT | GCCTCCCTCGCGCCATCAGGCCGAATTCATGCT |
| SEQ ID NO: 1553 | GCCTCCCGTAGGAGT |
| | SEQ ID NO: 1554 |
| GCCGATAT | GCCTCCCTCGCGCCATCAGGCCGATATCATGCT |
| SEQ ID NO: 1555 | GCCTCCCGTAGGAGT |
| | SEQ ID NO: 1556 |
| GCCGATTA | GCCTCCCTCGCGCCATCAGGCCGATTACATGCT |
| SEQ ID NO: 1557 | GCCTCCCGTAGGAGT |
| | SEQ ID NO: 1558 |
| GCCGTAAT | GCCTCCCTCGCGCCATCAGGCCGTAATCATGCT |
| SEQ ID NO: 1559 | GCCTCCCGTAGGAGT |
| | SEQ ID NO: 1560 |
| GCCGTATA | GCCTCCCTCGCGCCATCAGGCCGTATACATGCT |
| SEQ ID NO: 1561 | GCCTCCCGTAGGAGT |
| | SEQ ID NO: 1562 |
| GCCGTTAA | GCCTCCCTCGCGCCATCAGGCCGTTAACATGCT |
| SEQ ID NO: 1563 | GCCTCCCGTAGGAGT |
| | SEQ ID NO: 1564 |
| GCGCAATT | GCCTCCCTCGCGCCATCAGGCGCAATTCATGCT |
| SEQ ID NO: 1565 | GCCTCCCGTAGGAGT |
| | SEQ ID NO: 1566 |
| GCGCATAT | GCCTCCCTCGCGCCATCAGGCGCATATCATGCT |
| SEQ ID NO: 1567 | GCCTCCCGTAGGAGT |
| | SEQ ID NO: 1568 |
| GCGCATTA | GCCTCCCTCGCGCCATCAGGCGCATTACATGCT |
| SEQ ID NO: 1569 | GCCTCCCGTAGGAGT |
| | SEQ ID NO: 1570 |
| GCGCTAAT | GCCTCCCTCGCGCCATCAGGCGCTAATCATGCT |
| SEQ ID NO: 1571 | GCCTCCCGTAGGAGT |
| | SEQ ID NO: 1572 |
| GCGCTATA | GCCTCCCTCGCGCCATCAGGCGCTATACATGCT |
| SEQ ID NO: 1573 | GCCTCCCGTAGGAGT |
| | SEQ ID NO: 1574 |
| GCGCTTAA | GCCTCCCTCGCGCCATCAGGCGCTTAACATGCT |
| SEQ ID NO: 1575 | GCCTCCCGTAGGAGT |
| | SEQ ID NO: 1576 |
| GCGGAATA | GCCTCCCTCGCGCCATCAGGCGGAATACATGCT |
| SEQ ID NO: 1577 | GCCTCCCGTAGGAGT |
| | SEQ ID NO: 1578 |
| GCGGATAA | GCCTCCCTCGCGCCATCAGGCGGATAACATGCT |
| SEQ ID NO: 1579 | GCCTCCCGTAGGAGT |
| | SEQ ID NO: 1580 |
| GCGGTATT | GCCTCCCTCGCGCCATCAGGCGGTATTCATGCT |
| SEQ ID NO: 1581 | GCCTCCCGTAGGAGT |
| | SEQ ID NO: 1582 |
| GCGGTTAT | GCCTCCCTCGCGCCATCAGGCGGTTATCATGCT |
| SEQ ID NO: 1583 | GCCTCCCGTAGGAGT |
| | SEQ ID NO: 1584 |
| GCTAATCG | GCCTCCCTCGCGCCATCAGGCTAATCGCATGCT |
| SEQ ID NO: 1585 | GCCTCCCGTAGGAGT |
| | SEQ ID NO: 1586 |
| GCTAATGC | GCCTCCCTCGCGCCATCAGGCTAATGCCATGCT |
| SEQ ID NO: 1587 | GCCTCCCGTAGGAGT |
| | SEQ ID NO: 1588 |
| GCTACCAA | GCCTCCCTCGCGCCATCAGGCTACCAACATGCT |
| SEQ ID NO: 1589 | GCCTCCCGTAGGAGT |
| | SEQ ID NO: 1590 |
| GCTACCTT | GCCTCCCTCGCGCCATCAGGCTACCTTCATGCT |
| SEQ ID NO: 1591 | GCCTCCCGTAGGAGT |
| | SEQ ID NO: 1592 |
| GCTACGAT | GCCTCCCTCGCGCCATCAGGCTACGATCATGCT |
| SEQ ID NO: 1593 | GCCTCCCGTAGGAGT |
| | SEQ ID NO: 1594 |
| GCTACGTA | GCCTCCCTCGCGCCATCAGGCTACGTACATGCT |
| SEQ ID NO: 1595 | GCCTCCCGTAGGAGT |
| | SEQ ID NO: 1596 |
| GCTAGCAT | GCCTCCCTCGCGCCATCAGGCTAGCATCATGCT |
| SEQ ID NO: 1597 | GCCTCCCGTAGGAGT |
| | SEQ ID NO: 1598 |
| GCTAGCTA | GCCTCCCTCGCGCCATCAGGCTAGCTACATGCT |
| SEQ ID NO: 1599 | GCCTCCCGTAGGAGT |
| | SEQ ID NO: 1600 |
| GCTAGGAA | GCCTCCCTCGCGCCATCAGGCTAGGAACATGCT |
| SEQ ID NO: 1601 | GCCTCCCGTAGGAGT |
| | SEQ ID NO: 1602 |
| GCTAGGTT | GCCTCCCTCGCGCCATCAGGCTAGGTTCATGCT |
| SEQ ID NO: 1603 | GCCTCCCGTAGGAGT |
| | SEQ ID NO: 1604 |
| GCTATACG | GCCTCCCTCGCGCCATCAGGCTATACGCATGCT |
| SEQ ID NO: 1605 | GCCTCCCGTAGGAGT |
| | SEQ ID NO: 1606 |
| GCTATAGC | GCCTCCCTCGCGCCATCAGGCTATAGCCATGCT |
| SEQ ID NO: 1607 | GCCTCCCGTAGGAGT |
| | SEQ ID NO: 1608 |
| GCTATTCC | GCCTCCCTCGCGCCATCAGGCTATTCCCATGCT |
| SEQ ID NO: 1609 | GCCTCCCGTAGGAGT |
| | SEQ ID NO: 1610 |
| GCTATTGG | GCCTCCCTCGCGCCATCAGGCTATTGGCATGCT |
| SEQ ID NO: 1611 | GCCTCCCGTAGGAGT |
| | SEQ ID NO: 1612 |
| GCTTAACG | GCCTCCCTCGCGCCATCAGGCTTAACGCATGCT |
| SEQ ID NO: 1613 | GCCTCCCGTAGGAGT |
| | SEQ ID NO: 1614 |
| GCTTAAGC | GCCTCCCTCGCGCCATCAGGCTTAAGCCATGCT |
| SEQ ID NO: 1615 | GCCTCCCGTAGGAGT |
| | SEQ ID NO: 1616 |
| GCTTATCC | GCCTCCCTCGCGCCATCAGGCTTATCCCATGCT |
| SEQ ID NO: 1617 | GCCTCCCGTAGGAGT |
| | SEQ ID NO: 1618 |
| GCTTATGG | GCCTCCCTCGCGCCATCAGGCTTATGGCATGCT |
| SEQ ID NO: 1619 | GCCTCCCGTAGGAGT |
| | SEQ ID NO: 1620 |
| GCTTCCAT | GCCTCCCTCGCGCCATCAGGCTTCCATCATGCT |
| SEQ ID NO: 1621 | GCCTCCCGTAGGAGT |
| | SEQ ID NO: 1622 |
| GCTTCCTA | GCCTCCCTCGCGCCATCAGGCTTCCTACATGCT |
| SEQ ID NO: 1623 | GCCTCCCGTAGGAGT |
| | SEQ ID NO: 1624 |
| GCTTCGAA | GCCTCCCTCGCGCCATCAGGCTTCGAACATGCT |
| SEQ ID NO: 1625 | GCCTCCCGTAGGAGT |
| | SEQ ID NO: 1626 |
| GCTTCGTT | GCCTCCCTCGCGCCATCAGGCTTCGTTCATGCT |
| SEQ ID NO: 1627 | GCCTCCCGTAGGAGT |
| | SEQ ID NO: 1628 |
| GCTTGCAA | GCCTCCCTCGCGCCATCAGGCTTGCAACATGCT |
| SEQ ID NO: 1629 | GCCTCCCGTAGGAGT |
| | SEQ ID NO: 1630 |
| GCTTGCTT | GCCTCCCTCGCGCCATCAGGCTTGCTTCATGCT |
| SEQ ID NO: 1631 | GCCTCCCGTAGGAGT |
| | SEQ ID NO: 1632 |
| GCTTGGAT | GCCTCCCTCGCGCCATCAGGCTTGGATCATGCT |
| SEQ ID NO: 1633 | GCCTCCCGTAGGAGT |
| | SEQ ID NO: 1634 |
| GCTTGGTA | GCCTCCCTCGCGCCATCAGGCTTGGTACATGCT |
| SEQ ID NO: 1635 | GCCTCCCGTAGGAGT |
| | SEQ ID NO: 1636 |
| GGAACCAA | GCCTCCCTCGCGCCATCAGGGAACCAACATGCT |
| SEQ ID NO: 1637 | GCCTCCCGTAGGAGT |
| | SEQ ID NO: 1638 |
| GGAACCTT | GCCTCCCTCGCGCCATCAGGGAACCTTCATGCT |
| SEQ ID NO: 1639 | GCCTCCCGTAGGAGT |
| | SEQ ID NO: 1640 |
| GGAACGAT | GCCTCCCTCGCGCCATCAGGGAACGATCATGCT |
| SEQ ID NO: 1641 | GCCTCCCGTAGGAGT |
| | SEQ ID NO: 1642 |
| GGAACGTA | GCCTCCCTCGCGCCATCAGGGAACGTACATGCT |
| SEQ ID NO: 1643 | GCCTCCCGTAGGAGT |
| | SEQ ID NO: 1644 |
| GGAAGCAT | GCCTCCCTCGCGCCATCAGGGAAGCATCATGCT |
| SEQ ID NO: 1645 | GCCTCCCGTAGGAGT |
| | SEQ ID NO: 1646 |
| GGAAGCTA | GCCTCCCTCGCGCCATCAGGGAAGCTACATGCT |
| SEQ ID NO: 1647 | GCCTCCCGTAGGAGT |
| | SEQ ID NO: 1648 |
| GGAAGGAA | GCCTCCCTCGCGCCATCAGGGAAGGAACATGCT |
| SEQ ID NO: 1649 | GCCTCCCGTAGGAGT |
| | SEQ ID NO: 1650 |
| GGAAGGTT | GCCTCCCTCGCGCCATCAGGGAAGGTTCATGCT |
| SEQ ID NO: 1651 | GCCTCCCGTAGGAGT |
| | SEQ ID NO: 1652 |
| GGAATACG | GCCTCCCTCGCGCCATCAGGGAATACGCATGCT |
| SEQ ID NO: 1653 | GCCTCCCGTAGGAGT |
| | SEQ ID NO: 1654 |
| GGAATAGC | GCCTCCCTCGCGCCATCAGGGAATAGCCATGCT |
| SEQ ID NO: 1655 | GCCTCCCGTAGGAGT |
| | SEQ ID NO: 1656 |
| GGAATTCC | GCCTCCCTCGCGCCATCAGGGAATTCCCATGCT |
| SEQ ID NO: 1657 | GCCTCCCGTAGGAGT |
| | SEQ ID NO: 1658 |
| GGAATTGG | GCCTCCCTCGCGCCATCAGGGAATTGGCATGCT |
| SEQ ID NO: 1659 | GCCTCCCGTAGGAGT |
| | SEQ ID NO: 1660 |
| GGATAACG | GCCTCCCTCGCGCCATCAGGGATAACGCATGCT |
| SEQ ID NO: 1661 | GCCTCCCGTAGGAGT |
| | SEQ ID NO: 1662 |
| GGATAAGC | GCCTCCCTCGCGCCATCAGGGATAAGCCATGCT |
| SEQ ID NO: 1663 | GCCTCCCGTAGGAGT |
| | SEQ ID NO: 1664 |
| GGATATCC | GCCTCCCTCGCGCCATCAGGGATATCCCATGCT |
| SEQ ID NO: 1665 | GCCTCCCGTAGGAGT |
| | SEQ ID NO: 1666 |
| GGATATGG | GCCTCCCTCGCGCCATCAGGGATATGGCATGCT |
| SEQ ID NO: 1667 | GCCTCCCGTAGGAGT |
| | SEQ ID NO: 1668 |
| GGATCCAT | GCCTCCCTCGCGCCATCAGGGATCCATCATGCT |
| SEQ ID NO: 1669 | GCCTCCCGTAGGAGT |
| | SEQ ID NO: 1670 |
| GGATCCTA | GCCTCCCTCGCGCCATCAGGGATCCTACATGCT |
| SEQ ID NO: 1671 | GCCTCCCGTAGGAGT |
| | SEQ ID NO: 1672 |
| GGATCGAA | GCCTCCCTCGCGCCATCAGGGATCGAACATGCT |
| SEQ ID NO: 1673 | GCCTCCCGTAGGAGT |
| | SEQ ID NO: 1674 |
| GGATCGTT | GCCTCCCTCGCGCCATCAGGGATCGTTCATGCT |
| SEQ ID NO: 1675 | GCCTCCCGTAGGAGT |
| | SEQ ID NO: 1676 |
| GGATGCAA | GCCTCCCTCGCGCCATCAGGGATGCAACATGCT |
| SEQ ID NO: 1677 | GCCTCCCGTAGGAGT |
| | SEQ ID NO: 1678 |
| GGATGCTT | GCCTCCCTCGCGCCATCAGGGATGCTTCATGCT |
| SEQ ID NO: 1679 | GCCTCCCGTAGGAGT |
| | SEQ ID NO: 1680 |
| GGATGGAT | GCCTCCCTCGCGCCATCAGGGATGGATCATGCT |
| SEQ ID NO: 1681 | GCCTCCCGTAGGAGT |
| | SEQ ID NO: 1682 |
| GGATGGTA | GCCTCCCTCGCGCCATCAGGGATGGTACATGCT |
| SEQ ID NO: 1683 | GCCTCCCGTAGGAGT |
| | SEQ ID NO: 1684 |
| GGATTACC | GCCTCCCTCGCGCCATCAGGGATTACCCATGCT |
| SEQ ID NO: 1685 | GCCTCCCGTAGGAGT |
| | SEQ ID NO: 1686 |
| GGATTAGG | GCCTCCCTCGCGCCATCAGGGATTAGGCATGCT |
| SEQ ID NO: 1687 | GCCTCCCGTAGGAGT |
| | SEQ ID NO: 1688 |
| GGCCAATT | GCCTCCCTCGCGCCATCAGGGCCAATTCATGCT |
| SEQ ID NO: 1689 | GCCTCCCGTAGGAGT |
| | SEQ ID NO: 1690 |
| GGCCATAT | GCCTCCCTCGCGCCATCAGGGCCATATCATGCT |
| SEQ ID NO: 1691 | GCCTCCCGTAGGAGT |
| | SEQ ID NO: 1692 |
| GGCCATTA | GCCTCCCTCGCGCCATCAGGGCCATTACATGCT |
| SEQ ID NO: 1693 | GCCTCCCGTAGGAGT |
| | SEQ ID NO: 1694 |
| GGCCTAAT | GCCTCCCTCGCGCCATCAGGGCCTAATCATGCT |
| SEQ ID NO: 1695 | GCCTCCCGTAGGAGT |
| | SEQ ID NO: 1696 |
| GGCCTATA | GCCTCCCTCGCGCCATCAGGGCCTATACATGCT |
| SEQ ID NO: 1697 | GCCTCCCGTAGGAGT |
| | SEQ ID NO: 1698 |
| GGCCTTAA | GCCTCCCTCGCGCCATCAGGGCCTTAACATGCT |
| SEQ ID NO: 1699 | GCCTCCCGTAGGAGT |
| | SEQ ID NO: 1700 |
| GGCGAATA | GCCTCCCTCGCGCCATCAGGGCGAATACATGCT |
| SEQ ID NO: 1701 | GCCTCCCGTAGGAGT |
| | SEQ ID NO: 1702 |
| GGCGATAA | GCCTCCCTCGCGCCATCAGGGCGATAACATGCT |
| SEQ ID NO: 1703 | GCCTCCCGTAGGAGT |
| | SEQ ID NO: 1704 |
| GGCGTATT | GCCTCCCTCGCGCCATCAGGGCGTATTCATGCT |
| SEQ ID NO: 1705 | GCCTCCCGTAGGAGT |
| | SEQ ID NO: 1706 |
| GGCGTTAT | GCCTCCCTCGCGCCATCAGGGCGTTATCATGCT |
| SEQ ID NO: 1707 | GCCTCCCGTAGGAGT |
| | SEQ ID NO: 1708 |
| GGTAATCC | GCCTCCCTCGCGCCATCAGGGTAATCCCATGCT |
| SEQ ID NO: 1709 | GCCTCCCGTAGGAGT |
| | SEQ ID NO: 1710 |
| GGTAATGG | GCCTCCCTCGCGCCATCAGGGTAATGGCATGCT |
| SEQ ID NO: 1711 | GCCTCCCGTAGGAGT |
| | SEQ ID NO: 1712 |
| GGTACCAT | GCCTCCCTCGCGCCATCAGGGTACCATCATGCT |
| SEQ ID NO: 1713 | GCCTCCCGTAGGAGT |
| | SEQ ID NO: 1714 |
| GGTACCTA | GCCTCCCTCGCGCCATCAGGGTACCTACATGCT |
| SEQ ID NO: 1715 | GCCTCCCGTAGGAGT |
| | SEQ ID NO: 1716 |
| GGTACGAA | GCCTCCCTCGCGCCATCAGGGTACGAACATGCT |
| SEQ ID NO: 1717 | GCCTCCCGTAGGAGT |
| | SEQ ID NO: 1718 |
| GGTACGTT | GCCTCCCTCGCGCCATCAGGGTACGTTCATGCT |
| SEQ ID NO: 1719 | GCCTCCCGTAGGAGT |
| | SEQ ID NO: 1720 |
| GGTAGCAA | GCCTCCCTCGCGCCATCAGGGTAGCAACATGCT |
| SEQ ID NO: 1721 | GCCTCCCGTAGGAGT |
| | SEQ ID NO: 1722 |
| GGTAGCTT | GCCTCCCTCGCGCCATCAGGGTAGCTTCATGCT |
| SEQ ID NO: 1723 | GCCTCCCGTAGGAGT |
| | SEQ ID NO: 1724 |
| GGTAGGAT | GCCTCCCTCGCGCCATCAGGGTAGGATCATGCT |
| SEQ ID NO: 1725 | GCCTCCCGTAGGAGT |
| | SEQ ID NO: 1726 |
| GGTAGGTA | GCCTCCCTCGCGCCATCAGGGTAGGTACATGCT |
| SEQ ID NO: 1727 | GCCTCCCGTAGGAGT |
| | SEQ ID NO: 1728 |
| GGTATACC | GCCTCCCTCGCGCCATCAGGGTATACCCATGCT |
| SEQ ID NO: 1729 | GCCTCCCGTAGGAGT |
| | SEQ ID NO: 1730 |
| GGTATAGG | GCCTCCCTCGCGCCATCAGGGTATAGGCATGCT |
| SEQ ID NO: 1731 | GCCTCCCGTAGGAGT |
| | SEQ ID NO: 1732 |
| GGTATTCG | GCCTCCCTCGCGCCATCAGGGTATTCGCATGCT |
| SEQ ID NO: 1733 | GCCTCCCGTAGGAGT |
| | SEQ ID NO: 1734 |
| GGTATTGC | GCCTCCCTCGCGCCATCAGGGTATTGCCATGCT |
| SEQ ID NO: 1735 | GCCTCCCGTAGGAGT |
| | SEQ ID NO: 1736 |
| GGTTAACC | GCCTCCCTCGCGCCATCAGGGTTAACCCATGCT |
| SEQ ID NO: 1737 | GCCTCCCGTAGGAGT |
| | SEQ ID NO: 1738 |
| GGTTAAGG | GCCTCCCTCGCGCCATCAGGGTTAAGGCATGCT |
| SEQ ID NO: 1739 | GCCTCCCGTAGGAGT |
| | SEQ ID NO: 1740 |
| GGTTATCG | GCCTCCCTCGCGCCATCAGGGTTATCGCATGCT |
| SEQ ID NO: 1741 | GCCTCCCGTAGGAGT |
| | SEQ ID NO: 1742 |
| GGTTATGC | GCCTCCCTCGCGCCATCAGGGTTATGCCATGCT |
| SEQ ID NO: 1743 | GCCTCCCGTAGGAGT |
| | SEQ ID NO: 1744 |
| GGTTCCAA | GCCTCCCTCGCGCCATCAGGGTTCCAACATGCT |
| SEQ ID NO: 1745 | GCCTCCCGTAGGAGT |
| | SEQ ID NO: 1746 |
| GGTTCCTT | GCCTCCCTCGCGCCATCAGGGTTCCTTCATGCT |
| SEQ ID NO: 1747 | GCCTCCCGTAGGAGT |
| | SEQ ID NO: 1748 |
| GGTTCGAT | GCCTCCCTCGCGCCATCAGGGTTCGATCATGCT |
| SEQ ID NO: 1749 | GCCTCCCGTAGGAGT |
| | SEQ ID NO: 1750 |
| GGTTCGTA | GCCTCCCTCGCGCCATCAGGGTTCGTACATGCT |
| SEQ ID NO: 1751 | GCCTCCCGTAGGAGT |
| | SEQ ID NO: 1752 |
| GGTTGCAT | GCCTCCCTCGCGCCATCAGGGTTGCATCATGCT |
| SEQ ID NO: 1753 | GCCTCCCGTAGGAGT |
| | SEQ ID NO: 1754 |
| GGTTGCTA | GCCTCCCTCGCGCCATCAGGGTTGCTACATGCT |
| SEQ ID NO: 1755 | GCCTCCCGTAGGAGT |
| | SEQ ID NO: 1756 |
| GGTTGGAA | GCCTCCCTCGCGCCATCAGGGTTGGAACATGCT |
| SEQ ID NO: 1757 | GCCTCCCGTAGGAGT |
| | SEQ ID NO: 1758 |
| GGTTGGTT | GCCTCCCTCGCGCCATCAGGGTTGGTTCATGCT |
| SEQ ID NO: 1759 | GCCTCCCGTAGGAGT |
| | SEQ ID NO: 1760 |
| GTACACCA | GCCTCCCTCGCGCCATCAGGTACACCACATGCT |
| SEQ ID NO: 1761 | GCCTCCCGTAGGAGT |
| | SEQ ID NO: 1762 |
| GTACACGT | GCCTCCCTCGCGCCATCAGGTACACGTCATGCT |
| SEQ ID NO: 1763 | GCCTCCCGTAGGAGT |
| | SEQ ID NO: 1764 |
| GTACAGCT | GCCTCCCTCGCGCCATCAGGTACAGCTCATGCT |
| SEQ ID NO: 1765 | GCCTCCCGTAGGAGT |
| | SEQ ID NO: 1766 |
| GTACAGGA | GCCTCCCTCGCGCCATCAGGTACAGGACATGCT |
| SEQ ID NO: 1767 | GCCTCCCGTAGGAGT |
| | SEQ ID NO: 1768 |
| GTACCAAC | GCCTCCCTCGCGCCATCAGGTACCAACCATGCT |
| SEQ ID NO: 1769 | GCCTCCCGTAGGAGT |
| | SEQ ID NO: 1770 |
| GTACCATG | GCCTCCCTCGCGCCATCAGGTACCATGCATGCT |
| SEQ ID NO: 1771 | GCCTCCCGTAGGAGT |
| | SEQ ID NO: 1772 |
| GTACCTAG | GCCTCCCTCGCGCCATCAGGTACCTAGCATGCT |
| SEQ ID NO: 1773 | GCCTCCCGTAGGAGT |
| | SEQ ID NO: 1774 |
| GTACCTTC | GCCTCCCTCGCGCCATCAGGTACCTTCCATGCT |
| SEQ ID NO: 1775 | GCCTCCCGTAGGAGT |
| | SEQ ID NO: 1776 |
| GTACGAAG | GCCTCCCTCGCGCCATCAGGTACGAAGCATGCT |
| SEQ ID NO: 1777 | GCCTCCCGTAGGAGT |
| | SEQ ID NO: 1778 |
| GTACGATC | GCCTCCCTCGCGCCATCAGGTACGATCCATGCT |
| SEQ ID NO: 1779 | GCCTCCCGTAGGAGT |
| | SEQ ID NO: 1780 |
| GTACGTAC | GCCTCCCTCGCGCCATCAGGTACGTACCATGCT |
| SEQ ID NO: 1781 | GCCTCCCGTAGGAGT |
| | SEQ ID NO: 1782 |
| GTACGTTG | GCCTCCCTCGCGCCATCAGGTACGTTGCATGCT |
| SEQ ID NO: 1783 | GCCTCCCGTAGGAGT |
| | SEQ ID NO: 1784 |
| GTACTCCT | GCCTCCCTCGCGCCATCAGGTACTCCTCATGCT |
| SEQ ID NO: 1785 | GCCTCCCGTAGGAGT |
| | SEQ ID NO: 1786 |
| GTACTCGA | GCCTCCCTCGCGCCATCAGGTACTCGACATGCT |
| SEQ ID NO: 1787 | GCCTCCCGTAGGAGT |
| | SEQ ID NO: 1788 |
| GTACTGCA | GCCTCCCTCGCGCCATCAGGTACTGCACATGCT |
| SEQ ID NO: 1789 | GCCTCCCGTAGGAGT |
| | SEQ ID NO: 1790 |
| GTACTGGT | GCCTCCCTCGCGCCATCAGGTACTGGTCATGCT |
| SEQ ID NO: 1791 | GCCTCCCGTAGGAGT |
| | SEQ ID NO: 1792 |
| GTAGACCT | GCCTCCCTCGCGCCATCAGGTAGACCTCATGCT |
| SEQ ID NO: 1793 | GCCTCCCGTAGGAGT |
| | SEQ ID NO: 1794 |
| GTAGACGA | GCCTCCCTCGCGCCATCAGGTAGACGACATGCT |
| SEQ ID NO: 1795 | GCCTCCCGTAGGAGT |
| | SEQ ID NO: 1796 |
| GTAGAGCA | GCCTCCCTCGCGCCATCAGGTAGAGCACATGCT |
| SEQ ID NO: 1797 | GCCTCCCGTAGGAGT |
| | SEQ ID NO: 1798 |
| GTAGAGGT | GCCTCCCTCGCGCCATCAGGTAGAGGTCATGCT |
| SEQ ID NO: 1799 | GCCTCCCGTAGGAGT |
| | SEQ ID NO: 1800 |
| GTAGCAAG | GCCTCCCTCGCGCCATCAGGTAGCAAGCATGCT |
| SEQ ID NO: 1801 | GCCTCCCGTAGGAGT |
| | SEQ ID NO: 1802 |
| GTAGCATC | GCCTCCCTCGCGCCATCAGGTAGCATCCATGCT |
| SEQ ID NO: 1803 | GCCTCCCGTAGGAGT |
| | SEQ ID NO: 1804 |
| GTAGCTAC | GCCTCCCTCGCGCCATCAGGTAGCTACCATGCT |
| SEQ ID NO: 1805 | GCCTCCCGTAGGAGT |
| | SEQ ID NO: 1806 |
| GTAGCTTG | GCCTCCCTCGCGCCATCAGGTAGCTTGCATGCT |
| SEQ ID NO: 1807 | GCCTCCCGTAGGAGT |
| | SEQ ID NO: 1808 |
| GTAGGAAC | GCCTCCCTCGCGCCATCAGGTAGGAACCATGCT |
| SEQ ID NO: 1809 | GCCTCCCGTAGGAGT |
| | SEQ ID NO: 1810 |
| GTAGGATG | GCCTCCCTCGCGCCATCAGGTAGGATGCATGCT |
| SEQ ID NO: 1811 | GCCTCCCGTAGGAGT |
| | SEQ ID NO: 1812 |
| GTAGGTAG | GCCTCCCTCGCGCCATCAGGTAGGTAGCATGCT |
| SEQ ID NO: 1813 | GCCTCCCGTAGGAGT |
| | SEQ ID NO: 1814 |
| GTAGGTTC | GCCTCCCTCGCGCCATCAGGTAGGTTCCATGCT |
| SEQ ID NO: 1815 | GCCTCCCGTAGGAGT |
| | SEQ ID NO: 1816 |
| GTAGTCCA | GCCTCCCTCGCGCCATCAGGTAGTCCACATGCT |
| SEQ ID NO: 1817 | GCCTCCCGTAGGAGT |
| | SEQ ID NO: 1818 |
| GTAGTCGT | GCCTCCCTCGCGCCATCAGGTAGTCGTCATGCT |
| SEQ ID NO: 1819 | GCCTCCCGTAGGAGT |
| | SEQ ID NO: 1820 |
| GTAGTGCT | GCCTCCCTCGCGCCATCAGGTAGTGCTCATGCT |
| SEQ ID NO: 1821 | GCCTCCCGTAGGAGT |
| | SEQ ID NO: 1822 |
| GTAGTGGA | GCCTCCCTCGCGCCATCAGGTAGTGGACATGCT |
| SEQ ID NO: 1823 | GCCTCCCGTAGGAGT |
| | SEQ ID NO: 1824 |
| GTCAACAC | GCCTCCCTCGCGCCATCAGGTCAACACCATGCT |
| SEQ ID NO: 1825 | GCCTCCCGTAGGAGT |
| | SEQ ID NO: 1826 |
| GTCAACTG | GCCTCCCTCGCGCCATCAGGTCAACTGCATGCT |
| SEQ ID NO: 1827 | GCCTCCCGTAGGAGT |
| | SEQ ID NO: 1828 |
| GTCAAGAG | GCCTCCCTCGCGCCATCAGGTCAAGAGCATGCT |
| SEQ ID NO: 1829 | GCCTCCCGTAGGAGT |
| | SEQ ID NO: 1830 |
| GTCAAGTC | GCCTCCCTCGCGCCATCAGGTCAAGTCCATGCT |
| SEQ ID NO: 1831 | GCCTCCCGTAGGAGT |
| | SEQ ID NO: 1832 |
| GTCACACA | GCCTCCCTCGCGCCATCAGGTCACACACATGCT |
| SEQ ID NO: 1833 | GCCTCCCGTAGGAGT |
| | SEQ ID NO: 1834 |
| GTCACAGT | GCCTCCCTCGCGCCATCAGGTCACAGTCATGCT |
| SEQ ID NO: 1835 | GCCTCCCGTAGGAGT |
| | SEQ ID NO: 1836 |
| GTCACTCT | GCCTCCCTCGCGCCATCAGGTCACTCTCATGCT |
| SEQ ID NO: 1837 | GCCTCCCGTAGGAGT |
| | SEQ ID NO: 1838 |
| GTCACTGA | GCCTCCCTCGCGCCATCAGGTCACTGACATGCT |
| SEQ ID NO: 1839 | GCCTCCCGTAGGAGT |
| | SEQ ID NO: 1840 |
| GTCAGACT | GCCTCCCTCGCGCCATCAGGTCAGACTCATGCT |
| SEQ ID NO: 1841 | GCCTCCCGTAGGAGT |
| | SEQ ID NO: 1842 |
| GTCAGAGA | GCCTCCCTCGCGCCATCAGGTCAGAGACATGCT |
| SEQ ID NO: 1843 | GCCTCCCGTAGGAGT |
| | SEQ ID NO: 1844 |
| GTCAGTCA | GCCTCCCTCGCGCCATCAGGTCAGTCACATGCT |
| SEQ ID NO: 1845 | GCCTCCCGTAGGAGT |
| | SEQ ID NO: 1846 |
| GTCAGTGT | GCCTCCCTCGCGCCATCAGGTCAGTGTCATGCT |
| SEQ ID NO: 1847 | GCCTCCCGTAGGAGT |
| | SEQ ID NO: 1848 |
| GTCATCAG | GCCTCCCTCGCGCCATCAGGTCATCAGCATGCT |
| SEQ ID NO: 1849 | GCCTCCCGTAGGAGT |
| | SEQ ID NO: 1850 |
| GTCATCTC | GCCTCCCTCGCGCCATCAGGTCATCTCCATGCT |
| SEQ ID NO: 1851 | GCCTCCCGTAGGAGT |
| | SEQ ID NO: 1852 |
| GTCATGAC | GCCTCCCTCGCGCCATCAGGTCATGACCATGCT |
| SEQ ID NO: 1853 | GCCTCCCGTAGGAGT |
| | SEQ ID NO: 1854 |
| GTCATGTG | GCCTCCCTCGCGCCATCAGGTCATGTGCATGCT |
| SEQ ID NO: 1855 | GCCTCCCGTAGGAGT |
| | SEQ ID NO: 1856 |
| GTCTACAG | GCCTCCCTCGCGCCATCAGGTCTACAGCATGCT |
| SEQ ID NO: 1857 | GCCTCCCGTAGGAGT |
| | SEQ ID NO: 1858 |
| GTCTACTC | GCCTCCCTCGCGCCATCAGGTCTACTCCATGCT |
| SEQ ID NO: 1859 | GCCTCCCGTAGGAGT |
| | SEQ ID NO: 1860 |
| GTCTAGAC | GCCTCCCTCGCGCCATCAGGTCTAGACCATGCT |
| SEQ ID NO: 1861 | GCCTCCCGTAGGAGT |
| | SEQ ID NO: 1862 |
| GTCTAGTG | GCCTCCCTCGCGCCATCAGGTCTAGTGCATGCT |
| SEQ ID NO: 1863 | GCCTCCCGTAGGAGT |
| | SEQ ID NO: 1864 |
| GTCTCACT | GCCTCCCTCGCGCCATCAGGTCTCACTCATGCT |
| SEQ ID NO: 1865 | GCCTCCCGTAGGAGT |
| | SEQ ID NO: 1866 |
| GTCTCAGA | GCCTCCCTCGCGCCATCAGGTCTCAGACATGCT |
| SEQ ID NO: 1867 | GCCTCCCGTAGGAGT |
| | SEQ ID NO: 1868 |
| GTCTCTCA | GCCTCCCTCGCGCCATCAGGTCTCTCACATGCT |
| SEQ ID NO: 1869 | GCCTCCCGTAGGAGT |
| | SEQ ID NO: 1870 |
| GTCTCTGT | GCCTCCCTCGCGCCATCAGGTCTCTGTCATGCT |
| SEQ ID NO: 1871 | GCCTCCCGTAGGAGT |
| | SEQ ID NO: 1872 |
| GTCTGACA | GCCTCCCTCGCGCCATCAGGTCTGACACATGCT |
| SEQ ID NO: 1873 | GCCTCCCGTAGGAGT |
| | SEQ ID NO: 1874 |
| GTCTGAGT | GCCTCCCTCGCGCCATCAGGTCTGAGTCATGCT |
| SEQ ID NO: 1875 | GCCTCCCGTAGGAGT |
| | SEQ ID NO: 1876 |
| GTCTGTCT | GCCTCCCTCGCGCCATCAGGTCTGTCTCATGCT |
| SEQ ID NO: 1877 | GCCTCCCGTAGGAGT |
| | SEQ ID NO: 1878 |
| GTCTGTGA | GCCTCCCTCGCGCCATCAGGTCTGTGACATGCT |
| SEQ ID NO: 1879 | GCCTCCCGTAGGAGT |
| | SEQ ID NO: 1880 |
| GTCTTCAC | GCCTCCCTCGCGCCATCAGGTCTTCACCATGCT |
| SEQ ID NO: 1881 | GCCTCCCGTAGGAGT |
| | SEQ ID NO: 1882 |
| GTCTTCTG | GCCTCCCTCGCGCCATCAGGTCTTCTGCATGCT |
| SEQ ID NO: 1883 | GCCTCCCGTAGGAGT |
| | SEQ ID NO: 1884 |
| GTCTTGAG | GCCTCCCTCGCGCCATCAGGTCTTGAGCATGCT |
| SEQ ID NO: 1885 | GCCTCCCGTAGGAGT |
| | SEQ ID NO: 1886 |
| GTCTTGTC | GCCTCCCTCGCGCCATCAGGTCTTGTCCATGCT |
| SEQ ID NO: 1887 | GCCTCCCGTAGGAGT |
| | SEQ ID NO: 1888 |
| GTGAACAG | GCCTCCCTCGCGCCATCAGGTGAACAGCATGCT |
| SEQ ID NO: 1889 | GCCTCCCGTAGGAGT |
| | SEQ ID NO: 1890 |
| GTGAACTC | GCCTCCCTCGCGCCATCAGGTGAACTCCATGCT |
| SEQ ID NO: 1891 | GCCTCCCGTAGGAGT |
| | SEQ ID NO: 1892 |
| GTGAAGAC | GCCTCCCTCGCGCCATCAGGTGAAGACCATGCT |
| SEQ ID NO: 1893 | GCCTCCCGTAGGAGT |
| | SEQ ID NO: 1894 |
| GTGAAGTG | GCCTCCCTCGCGCCATCAGGTGAAGTGCATGCT |
| SEQ ID NO: 1895 | GCCTCCCGTAGGAGT |
| | SEQ ID NO: 1896 |
| GTGACACT | GCCTCCCTCGCGCCATCAGGTGACACTCATGCT |
| SEQ ID NO: 1897 | GCCTCCCGTAGGAGT |
| | SEQ ID NO: 1898 |
| GTGACAGA | GCCTCCCTCGCGCCATCAGGTGACAGACATGCT |
| SEQ ID NO: 1899 | GCCTCCCGTAGGAGT |
| | SEQ ID NO: 1900 |
| GTGACTCA | GCCTCCCTCGCGCCATCAGGTGACTCACATGCT |
| SEQ ID NO: 1901 | GCCTCCCGTAGGAGT |
| | SEQ ID NO: 1902 |
| GTGACTGT | GCCTCCCTCGCGCCATCAGGTGACTGTCATGCT |
| SEQ ID NO: 1903 | GCCTCCCGTAGGAGT |
| | SEQ ID NO: 1904 |
| GTGAGACA | GCCTCCCTCGCGCCATCAGGTGAGACACATGCT |
| SEQ ID NO: 1905 | GCCTCCCGTAGGAGT |
| | SEQ ID NO: 1906 |
| GTGAGAGT | GCCTCCCTCGCGCCATCAGGTGAGAGTCATGCT |
| SEQ ID NO: 1907 | GCCTCCCGTAGGAGT |
| | SEQ ID NO: 1908 |
| GTGAGTCT | GCCTCCCTCGCGCCATCAGGTGAGTCTCATGCT |
| SEQ ID NO: 1909 | GCCTCCCGTAGGAGT |
| | SEQ ID NO: 1910 |
| GTGAGTGA | GCCTCCCTCGCGCCATCAGGTGAGTGACATGCT |
| SEQ ID NO: 1911 | GCCTCCCGTAGGAGT |
| | SEQ ID NO: 1912 |
| GTGATCAC | GCCTCCCTCGCGCCATCAGGTGATCACCATGCT |
| SEQ ID NO: 1913 | GCCTCCCGTAGGAGT |
| | SEQ ID NO: 1914 |
| GTGATCTG | GCCTCCCTCGCGCCATCAGGTGATCTGCATGCT |
| SEQ ID NO: 1915 | GCCTCCCGTAGGAGT |
| | SEQ ID NO: 1916 |
| GTGATGAG | GCCTCCCTCGCGCCATCAGGTGATGAGCATGCT |
| SEQ ID NO: 1917 | GCCTCCCGTAGGAGT |
| | SEQ ID NO: 1918 |
| GTGATGTC | GCCTCCCTCGCGCCATCAGGTGATGTCCATGCT |
| SEQ ID NO: 1919 | GCCTCCCGTAGGAGT |
| | SEQ ID NO: 1920 |
| GTGTACAC | GCCTCCCTCGCGCCATCAGGTGTACACCATGCT |
| SEQ ID NO: 1921 | GCCTCCCGTAGGAGT |
| | SEQ ID NO: 1922 |
| GTGTACTG | GCCTCCCTCGCGCCATCAGGTGTACTGCATGCT |
| SEQ ID NO: 1923 | GCCTCCCGTAGGAGT |
| | SEQ ID NO: 1924 |
| GTGTAGAG | GCCTCCCTCGCGCCATCAGGTGTAGAGCATGCT |
| SEQ ID NO: 1925 | GCCTCCCGTAGGAGT |
| | SEQ ID NO: 1926 |
| GTGTAGTC | GCCTCCCTCGCGCCATCAGGTGTAGTCCATGCT |
| SEQ ID NO: 1927 | GCCTCCCGTAGGAGT |
| | SEQ ID NO: 1928 |
| GTGTCACA | GCCTCCCTCGCGCCATCAGGTGTCACACATGCT |
| SEQ ID NO: 1929 | GCCTCCCGTAGGAGT |
| | SEQ ID NO: 1930 |
| GTGTCAGT | GCCTCCCTCGCGCCATCAGGTGTCAGTCATGCT |
| SEQ ID NO: 1931 | GCCTCCCGTAGGAGT |
| | SEQ ID NO: 1932 |
| GTGTCTCT | GCCTCCCTCGCGCCATCAGGTGTCTCTCATGCT |
| SEQ ID NO: 1933 | GCCTCCCGTAGGAGT |
| | SEQ ID NO: 1934 |
| GTGTCTGA | GCCTCCCTCGCGCCATCAGGTGTCTGACATGCT |
| SEQ ID NO: 1935 | GCCTCCCGTAGGAGT |
| | SEQ ID NO: 1936 |
| GTGTGACT | GCCTCCCTCGCGCCATCAGGTGTGACTCATGCT |
| SEQ ID NO: 1937 | GCCTCCCGTAGGAGT |
| | SEQ ID NO: 1938 |
| GTGTGAGA | GCCTCCCTCGCGCCATCAGGTGTGAGACATGCT |
| SEQ ID NO: 1939 | GCCTCCCGTAGGAGT |
| | SEQ ID NO: 1940 |
| GTGTGTCA | GCCTCCCTCGCGCCATCAGGTGTGTCACATGCT |
| SEQ ID NO: 1941 | GCCTCCCGTAGGAGT |
| | SEQ ID NO: 1942 |
| GTGTGTGT | GCCTCCCTCGCGCCATCAGGTGTGTGTCATGCT |
| SEQ ID NO: 1943 | GCCTCCCGTAGGAGT |
| | SEQ ID NO: 1944 |
| GTGTTCAG | GCCTCCCTCGCGCCATCAGGTGTTCAGCATGCT |
| SEQ ID NO: 1945 | GCCTCCCGTAGGAGT |
| | SEQ ID NO: 1946 |
| GTGTTCTC | GCCTCCCTCGCGCCATCAGGTGTTCTCCATGCT |
| SEQ ID NO: 1947 | GCCTCCCGTAGGAGT |
| | SEQ ID NO: 1948 |
| GTGTTGAC | GCCTCCCTCGCGCCATCAGGTGTTGACCATGCT |
| SEQ ID NO: 1949 | GCCTCCCGTAGGAGT |
| | SEQ ID NO: 1950 |
| GTGTTGTG | GCCTCCCTCGCGCCATCAGGTGTTGTGCATGCT |
| SEQ ID NO: 1951 | GCCTCCCGTAGGAGT |
| | SEQ ID NO: 1952 |
| GTTCACCT | GCCTCCCTCGCGCCATCAGGTTCACCTCATGCT |
| SEQ ID NO: 1953 | GCCTCCCGTAGGAGT |
| | SEQ ID NO: 1954 |
| GTTCACGA | GCCTCCCTCGCGCCATCAGGTTCACGACATGCT |
| SEQ ID NO: 1955 | GCCTCCCGTAGGAGT |
| | SEQ ID NO: 1956 |
| GTTCAGCA | GCCTCCCTCGCGCCATCAGGTTCAGCACATGCT |
| SEQ ID NO: 1957 | GCCTCCCGTAGGAGT |
| | SEQ ID NO: 1958 |
| GTTCAGGT | GCCTCCCTCGCGCCATCAGGTTCAGGTCATGCT |
| SEQ ID NO: 1959 | GCCTCCCGTAGGAGT |
| | SEQ ID NO: 1960 |
| GTTCCAAG | GCCTCCCTCGCGCCATCAGGTTCCAAGCATGCT |
| SEQ ID NO: 1961 | GCCTCCCGTAGGAGT |
| | SEQ ID NO: 1962 |
| GTTCCATC | GCCTCCCTCGCGCCATCAGGTTCCATCCATGCT |
| SEQ ID NO: 1963 | GCCTCCCGTAGGAGT |
| | SEQ ID NO: 1964 |
| GTTCCTAC | GCCTCCCTCGCGCCATCAGGTTCCTACCATGCT |
| SEQ ID NO: 1965 | GCCTCCCGTAGGAGT |
| | SEQ ID NO: 1966 |
| GTTCCTTG | GCCTCCCTCGCGCCATCAGGTTCCTTGCATGCT |
| SEQ ID NO: 1967 | GCCTCCCGTAGGAGT |
| | SEQ ID NO: 1968 |
| GTTCGAAC | GCCTCCCTCGCGCCATCAGGTTCGAACCATGCT |
| SEQ ID NO: 1969 | GCCTCCCGTAGGAGT |
| | SEQ ID NO: 1970 |
| GTTCGATG | GCCTCCCTCGCGCCATCAGGTTCGATGCATGCT |
| SEQ ID NO: 1971 | GCCTCCCGTAGGAGT |
| | SEQ ID NO: 1972 |
| GTTCGTAG | GCCTCCCTCGCGCCATCAGGTTCGTAGCATGCT |
| SEQ ID NO: 1973 | GCCTCCCGTAGGAGT |
| | SEQ ID NO: 1974 |
| GTTCGTTC | GCCTCCCTCGCGCCATCAGGTTCGTTCCATGCT |
| SEQ ID NO: 1975 | GCCTCCCGTAGGAGT |
| | SEQ ID NO: 1976 |
| GTTCTCCA | GCCTCCCTCGCGCCATCAGGTTCTCCACATGCT |
| SEQ ID NO: 1977 | GCCTCCCGTAGGAGT |
| | SEQ ID NO: 1978 |
| GTTCTCGT | GCCTCCCTCGCGCCATCAGGTTCTCGTCATGCT |
| SEQ ID NO: 1979 | GCCTCCCGTAGGAGT |
| | SEQ ID NO: 1980 |
| GTTCTGCT | GCCTCCCTCGCGCCATCAGGTTCTGCTCATGCT |
| SEQ ID NO: 1981 | GCCTCCCGTAGGAGT |
| | SEQ ID NO: 1982 |
| GTTCTGGA | GCCTCCCTCGCGCCATCAGGTTCTGGACATGCT |
| SEQ ID NO: 1983 | GCCTCCCGTAGGAGT |
| | SEQ ID NO: 1984 |
| GTTGACCA | GCCTCCCTCGCGCCATCAGGTTGACCACATGCT |
| SEQ ID NO: 1985 | GCCTCCCGTAGGAGT |
| | SEQ ID NO: 1986 |
| GTTGACGT | GCCTCCCTCGCGCCATCAGGTTGACGTCATGCT |
| SEQ ID NO: 1987 | GCCTCCCGTAGGAGT |
| | SEQ ID NO: 1988 |
| GTTGAGCT | GCCTCCCTCGCGCCATCAGGTTGAGCTCATGCT |
| SEQ ID NO: 1989 | GCCTCCCGTAGGAGT |
| | SEQ ID NO: 1990 |
| GTTGAGGA | GCCTCCCTCGCGCCATCAGGTTGAGGACATGCT |
| SEQ ID NO: 1991 | GCCTCCCGTAGGAGT |
| | SEQ ID NO: 1992 |
| GTTGCAAC | GCCTCCCTCGCGCCATCAGGTTGCAACCATGCT |
| SEQ ID NO: 1993 | GCCTCCCGTAGGAGT |
| | SEQ ID NO: 1994 |
| GTTGCATG | GCCTCCCTCGCGCCATCAGGTTGCATGCATGCT |
| SEQ ID NO: 1995 | GCCTCCCGTAGGAGT |
| | SEQ ID NO: 1996 |
| GTTGCTAG | GCCTCCCTCGCGCCATCAGGTTGCTAGCATGCT |
| SEQ ID NO: 1997 | GCCTCCCGTAGGAGT |
| | SEQ ID NO: 1998 |
| GTTGCTTC | GCCTCCCTCGCGCCATCAGGTTGCTTCCATGCT |
| SEQ ID NO: 1999 | GCCTCCCGTAGGAGT |
| | SEQ ID NO: 2000 |
| GTTGGAAG | GCCTCCCTCGCGCCATCAGGTTGGAAGCATGCT |
| SEQ ID NO: 2001 | GCCTCCCGTAGGAGT |
| | SEQ ID NO: 2002 |
| GTTGGATC | GCCTCCCTCGCGCCATCAGGTTGGATCCATGCT |
| SEQ ID NO: 2003 | GCCTCCCGTAGGAGT |
| | SEQ ID NO: 2004 |
| GTTGGTAC | GCCTCCCTCGCGCCATCAGGTTGGTACCATGCT |
| SEQ ID NO: 2005 | GCCTCCCGTAGGAGT |
| | SEQ ID NO: 2006 |
| GTTGGTTG | GCCTCCCTCGCGCCATCAGGTTGGTTGCATGCT |
| SEQ ID NO: 2007 | GCCTCCCGTAGGAGT |
| | SEQ ID NO: 2008 |
| GTTGTCCT | GCCTCCCTCGCGCCATCAGGTTGTCCTCATGCT |
| SEQ ID NO: 2009 | GCCTCCCGTAGGAGT |
| | SEQ ID NO: 2010 |
| GTTGTCGA | GCCTCCCTCGCGCCATCAGGTTGTCGACATGCT |
| SEQ ID NO: 2011 | GCCTCCCGTAGGAGT |
| | SEQ ID NO: 2012 |
| GTTGTGCA | GCCTCCCTCGCGCCATCAGGTTGTGCACATGCT |
| SEQ ID NO: 2013 | GCCTCCCGTAGGAGT |
| | SEQ ID NO: 2014 |
| GTTGTGGT | GCCTCCCTCGCGCCATCAGGTTGTGGTCATGCT |
| SEQ ID NO: 2015 | GCCTCCCGTAGGAGT |
| | SEQ ID NO: 2016 |
| TAATCCGG | GCCTCCCTCGCGCCATCAGTAATCCGGCATGCT |
| SEQ ID NO: 2017 | GCCTCCCGTAGGAGT |
| | SEQ ID NO: 2018 |
| TAATCGCG | GCCTCCCTCGCGCCATCAGTAATCGCGCATGCT |
| SEQ ID NO: 2019 | GCCTCCCGTAGGAGT |
| | SEQ ID NO: 2020 |
| TAATCGGC | GCCTCCCTCGCGCCATCAGTAATCGGCCATGCT |
| SEQ ID NO: 2021 | GCCTCCCGTAGGAGT |
| | SEQ ID NO: 2022 |
| TAATGCCG | GCCTCCCTCGCGCCATCAGTAATGCCGCATGCT |
| SEQ ID NO: 2023 | GCCTCCCGTAGGAGT |
| | SEQ ID NO: 2034 |
| TAATGCGC | GCCTCCCTCGCGCCATCAGTAATGCGCCATGCT |
| SEQ ID NO: 2035 | GCCTCCCGTAGGAGT |
| | SEQ ID NO: 2036 |
| TAATGGCC | GCCTCCCTCGCGCCATCAGTAATGGCCCATGCT |
| SEQ ID NO: 2037 | GCCTCCCGTAGGAGT |
| | SEQ ID NO: 2038 |
| TACCAACG | GCCTCCCTCGCGCCATCAGTACCAACGCATGCT |
| SEQ ID NO: 2039 | GCCTCCCGTAGGAGT |
| | SEQ ID NO: 2040 |
| TACCAAGC | GCCTCCCTCGCGCCATCAGTACCAAGCCATGCT |
| SEQ ID NO: 2041 | GCCTCCCGTAGGAGT |
| | SEQ ID NO: 2042 |
| TACCATCC | GCCTCCCTCGCGCCATCAGTACCATCCCATGCT |
| SEQ ID NO: 2043 | GCCTCCCGTAGGAGT |
| | SEQ ID NO: 2044 |
| TACCATGG | GCCTCCCTCGCGCCATCAGTACCATGGCATGCT |
| SEQ ID NO: 2045 | GCCTCCCGTAGGAGT |
| | SEQ ID NO: 2046 |
| TACCGCAA | GCCTCCCTCGCGCCATCAGTACCGCAACATGCT |
| SEQ ID NO: 2047 | GCCTCCCGTAGGAGT |
| | SEQ ID NO: 2048 |
| TACCGCTT | GCCTCCCTCGCGCCATCAGTACCGCTTCATGCT |
| SEQ ID NO: 2049 | GCCTCCCGTAGGAGT |
| | SEQ ID NO: 2050 |
| TACCGGAT | GCCTCCCTCGCGCCATCAGTACCGGATCATGCT |
| SEQ ID NO: 2051 | GCCTCCCGTAGGAGT |
| | SEQ ID NO: 2052 |
| TACCGGTA | GCCTCCCTCGCGCCATCAGTACCGGTACATGCT |
| SEQ ID NO: 2053 | GCCTCCCGTAGGAGT |
| | SEQ ID NO: 2054 |
| TACCTACC | GCCTCCCTCGCGCCATCAGTACCTACCCATGCT |
| SEQ ID NO: 2055 | GCCTCCCGTAGGAGT |
| | SEQ ID NO: 2056 |
| TACCTAGG | GCCTCCCTCGCGCCATCAGTACCTAGGCATGCT |
| SEQ ID NO: 2057 | GCCTCCCGTAGGAGT |
| | SEQ ID NO: 2058 |
| TACCTTCG | GCCTCCCTCGCGCCATCAGTACCTTCGCATGCT |
| SEQ ID NO: 2059 | GCCTCCCGTAGGAGT |
| | SEQ ID NO: 2060 |
| TACCTTGC | GCCTCCCTCGCGCCATCAGTACCTTGCCATGCT |
| SEQ ID NO: 2061 | GCCTCCCGTAGGAGT |
| | SEQ ID NO: 2062 |
| TACGAACC | GCCTCCCTCGCGCCATCAGTACGAACCCATGCT |
| SEQ ID NO: 2063 | GCCTCCCGTAGGAGT |
| | SEQ ID NO: 2064 |
| TACGAAGG | GCCTCCCTCGCGCCATCAGTACGAAGGCATGCT |
| SEQ ID NO: 2065 | GCCTCCCGTAGGAGT |
| | SEQ ID NO: 2066 |
| TACGATCG | GCCTCCCTCGCGCCATCAGTACGATCGCATGCT |
| SEQ ID NO: 2067 | GCCTCCCGTAGGAGT |
| | SEQ ID NO: 2068 |
| TACGATGC | GCCTCCCTCGCGCCATCAGTACGATGCCATGCT |
| SEQ ID NO: 2069 | GCCTCCCGTAGGAGT |
| | SEQ ID NO: 2070 |
| TACGCCAA | GCCTCCCTCGCGCCATCAGTACGCCAACATGCT |
| SEQ ID NO: 2071 | GCCTCCCGTAGGAGT |
| | SEQ ID NO: 2072 |
| TACGCCTT | GCCTCCCTCGCGCCATCAGTACGCCTTCATGCT |
| SEQ ID NO: 2073 | GCCTCCCGTAGGAGT |
| | SEQ ID NO: 2074 |
| TACGCGAT | GCCTCCCTCGCGCCATCAGTACGCGATCATGCT |
| SEQ ID NO: 2075 | GCCTCCCGTAGGAGT |
| | SEQ ID NO: 2076 |
| TACGCGTA | GCCTCCCTCGCGCCATCAGTACGCGTACATGCT |
| SEQ ID NO: 2077 | GCCTCCCGTAGGAGT |
| | SEQ ID NO: 2078 |
| TACGGCAT | GCCTCCCTCGCGCCATCAGTACGGCATCATGCT |
| SEQ ID NO: 2079 | GCCTCCCGTAGGAGT |
| | SEQ ID NO: 2080 |
| TACGGCTA | GCCTCCCTCGCGCCATCAGTACGGCTACATGCT |
| SEQ ID NO: 2081 | GCCTCCCGTAGGAGT |
| | SEQ ID NO: 2082 |
| TACGTACG | GCCTCCCTCGCGCCATCAGTACGTACGCATGCT |
| SEQ ID NO: 2083 | GCCTCCCGTAGGAGT |
| | SEQ ID NO: 2084 |
| TACGTAGC | GCCTCCCTCGCGCCATCAGTACGTAGCCATGCT |
| SEQ ID NO: 2085 | GCCTCCCGTAGGAGT |
| | SEQ ID NO: 2086 |
| TACGTTCC | GCCTCCCTCGCGCCATCAGTACGTTCCCATGCT |
| SEQ ID NO: 2087 | GCCTCCCGTAGGAGT |
| | SEQ ID NO: 2088 |
| TACGTTGG | GCCTCCCTCGCGCCATCAGTACGTTGGCATGCT |
| SEQ ID NO: 2089 | GCCTCCCGTAGGAGT |
| | SEQ ID NO: 2090 |
| TAGCAACC | GCCTCCCTCGCGCCATCAGTAGCAACCCATGCT |
| SEQ ID NO: 2091 | GCCTCCCGTAGGAGT |
| | SEQ ID NO: 2092 |
| TAGCAAGG | GCCTCCCTCGCGCCATCAGTAGCAAGGCATGCT |
| SEQ ID NO: 2093 | GCCTCCCGTAGGAGT |
| | SEQ ID NO: 2094 |
| TAGCATCG | GCCTCCCTCGCGCCATCAGTAGCATCGCATGCT |
| SEQ ID NO: 2095 | GCCTCCCGTAGGAGT |
| | SEQ ID NO: 2096 |
| TAGCATGC | GCCTCCCTCGCGCCATCAGTAGCATGCCATGCT |
| SEQ ID NO: 2097 | GCCTCCCGTAGGAGT |
| | SEQ ID NO: 2098 |
| TAGCCGAT | GCCTCCCTCGCGCCATCAGTAGCCGATCATGCT |
| SEQ ID NO: 2099 | GCCTCCCGTAGGAGT |
| | SEQ ID NO: 2100 |
| TAGCCGTA | GCCTCCCTCGCGCCATCAGTAGCCGTACATGCT |
| SEQ ID NO: 2101 | GCCTCCCGTAGGAGT |
| | SEQ ID NO: 2102 |
| TAGCGCAT | GCCTCCCTCGCGCCATCAGTAGCGCATCATGCT |
| SEQ ID NO: 2103 | GCCTCCCGTAGGAGT |
| | SEQ ID NO: 2104 |
| TAGCGCTA | GCCTCCCTCGCGCCATCAGTAGCGCTACATGCT |
| SEQ ID NO: 2105 | GCCTCCCGTAGGAGT |
| | SEQ ID NO: 2106 |
| TAGCGGAA | GCCTCCCTCGCGCCATCAGTAGCGGAACATGCT |
| SEQ ID NO: 2107 | GCCTCCCGTAGGAGT |
| | SEQ ID NO: 2108 |
| TAGCGGTT | GCCTCCCTCGCGCCATCAGTAGCGGTTCATGCT |
| SEQ ID NO: 2109 | GCCTCCCGTAGGAGT |
| | SEQ ID NO: 2110 |
| TAGCTACG | GCCTCCCTCGCGCCATCAGTAGCTACGCATGCT |
| SEQ ID NO: 2111 | GCCTCCCGTAGGAGT |
| | SEQ ID NO: 2112 |
| TAGCTAGC | GCCTCCCTCGCGCCATCAGTAGCTAGCCATGCT |
| SEQ ID NO: 2113 | GCCTCCCGTAGGAGT |
| | SEQ ID NO: 2114 |
| TAGCTTCC | GCCTCCCTCGCGCCATCAGTAGCTTCCCATGCT |
| SEQ ID NO: 2115 | GCCTCCCGTAGGAGT |
| | SEQ ID NO: 2116 |
| TAGCTTGG | GCCTCCCTCGCGCCATCAGTAGCTTGGCATGCT |
| SEQ ID NO: 2117 | GCCTCCCGTAGGAGT |
| | SEQ ID NO: 2118 |
| TAGGAACG | GCCTCCCTCGCGCCATCAGTAGGAACGCATGCT |
| SEQ ID NO: 2119 | GCCTCCCGTAGGAGT |
| | SEQ ID NO: 2120 |
| TAGGAAGC | GCCTCCCTCGCGCCATCAGTAGGAAGCCATGCT |
| SEQ ID NO: 2121 | GCCTCCCGTAGGAGT |
| | SEQ ID NO: 2122 |
| TAGGATCC | GCCTCCCTCGCGCCATCAGTAGGATCCCATGCT |
| SEQ ID NO: 2123 | GCCTCCCGTAGGAGT |
| | SEQ ID NO: 2134 |
| TAGGATGG | GCCTCCCTCGCGCCATCAGTAGGATGGCATGCT |
| SEQ ID NO: 2135 | GCCTCCCGTAGGAGT |
| | SEQ ID NO: 2136 |
| TAGGCCAT | GCCTCCCTCGCGCCATCAGTAGGCCATCATGCT |
| SEQ ID NO: 2137 | GCCTCCCGTAGGAGT |
| | SEQ ID NO: 2138 |
| TAGGCCTA | GCCTCCCTCGCGCCATCAGTAGGCCTACATGCT |
| SEQ ID NO: 2139 | GCCTCCCGTAGGAGT |
| | SEQ ID NO: 2140 |
| TAGGCGAA | GCCTCCCTCGCGCCATCAGTAGGCGAACATGCT |
| SEQ ID NO: 2141 | GCCTCCCGTAGGAGT |
| | SEQ ID NO: 2142 |
| TAGGCGTT | GCCTCCCTCGCGCCATCAGTAGGCGTTCATGCT |
| SEQ ID NO: 2143 | GCCTCCCGTAGGAGT |
| | SEQ ID NO: 2144 |
| TAGGTACC | GCCTCCCTCGCGCCATCAGTAGGTACCCATGCT |
| SEQ ID NO: 2145 | GCCTCCCGTAGGAGT |
| | SEQ ID NO: 2146 |
| TAGGTAGG | GCCTCCCTCGCGCCATCAGTAGGTAGGCATGCT |
| SEQ ID NO: 2147 | GCCTCCCGTAGGAGT |
| | SEQ ID NO: 2148 |
| TAGGTTCG | GCCTCCCTCGCGCCATCAGTAGGTTCGCATGCT |
| SEQ ID NO: 2149 | GCCTCCCGTAGGAGT |
| | SEQ ID NO: 2150 |
| TAGGTTGC | GCCTCCCTCGCGCCATCAGTAGGTTGCCATGCT |
| SEQ ID NO: 2151 | GCCTCCCGTAGGAGT |
| | SEQ ID NO: 2152 |
| TATACCGG | GCCTCCCTCGCGCCATCAGTATACCGGCATGCT |
| SEQ ID NO: 2153 | GCCTCCCGTAGGAGT |
| | SEQ ID NO: 2154 |
| TATACGCG | GCCTCCCTCGCGCCATCAGTATACGCGCATGCT |
| SEQ ID NO: 2155 | GCCTCCCGTAGGAGT |
| | SEQ ID NO: 2156 |
| TATACGGC | GCCTCCCTCGCGCCATCAGTATACGGCCATGCT |
| SEQ ID NO: 2157 | GCCTCCCGTAGGAGT |
| | SEQ ID NO: 2158 |
| TATAGCCG | GCCTCCCTCGCGCCATCAGTATAGCCGCATGCT |
| SEQ ID NO: 2159 | GCCTCCCGTAGGAGT |
| | SEQ ID NO: 2160 |
| TATAGCGC | GCCTCCCTCGCGCCATCAGTATAGCGCCATGCT |
| SEQ ID NO: 2161 | GCCTCCCGTAGGAGT |
| | SEQ ID NO: 2162 |
| TATAGGCC | GCCTCCCTCGCGCCATCAGTATAGGCCCATGCT |
| SEQ ID NO: 2163 | GCCTCCCGTAGGAGT |
| | SEQ ID NO: 2164 |
| TATTCCGC | GCCTCCCTCGCGCCATCAGTATTCCGCCATGCT |
| SEQ ID NO: 2165 | GCCTCCCGTAGGAGT |
| | SEQ ID NO: 2166 |
| TATTCGCC | GCCTCCCTCGCGCCATCAGTATTCGCCCATGCT |
| SEQ ID NO: 2167 | GCCTCCCGTAGGAGT |
| | SEQ ID NO: 2168 |
| TATTGCGG | GCCTCCCTCGCGCCATCAGTATTGCGGCATGCT |
| SEQ ID NO: 2169 | GCCTCCCGTAGGAGT |
| | SEQ ID NO: 2170 |
| TATTGGCG | GCCTCCCTCGCGCCATCAGTATTGGCGCATGCT |
| SEQ ID NO: 2171 | GCCTCCCGTAGGAGT |
| | SEQ ID NO: 2172 |
| TCACACAG | GCCTCCCTCGCGCCATCAGTCACACAGCATGCT |
| SEQ ID NO: 2173 | GCCTCCCGTAGGAGT |
| | SEQ ID NO: 2174 |
| TCACACTC | GCCTCCCTCGCGCCATCAGTCACACTCCATGCT |
| SEQ ID NO: 2175 | GCCTCCCGTAGGAGT |
| | SEQ ID NO: 2176 |
| TCACAGAC | GCCTCCCTCGCGCCATCAGTCACAGACCATGCT |
| SEQ ID NO: 2177 | GCCTCCCGTAGGAGT |
| | SEQ ID NO: 2178 |
| TCACAGTG | GCCTCCCTCGCGCCATCAGTCACAGTGCATGCT |
| SEQ ID NO: 2179 | GCCTCCCGTAGGAGT |
| | SEQ ID NO: 2180 |
| TCACCACT | GCCTCCCTCGCGCCATCAGTCACCACTCATGCT |
| SEQ ID NO: 2181 | GCCTCCCGTAGGAGT |
| | SEQ ID NO: 2182 |
| TCACCAGA | GCCTCCCTCGCGCCATCAGTCACCAGACATGCT |
| SEQ ID NO: 2183 | GCCTCCCGTAGGAGT |
| | SEQ ID NO: 2184 |
| TCACCTCA | GCCTCCCTCGCGCCATCAGTCACCTCACATGCT |
| SEQ ID NO: 2185 | GCCTCCCGTAGGAGT |
| | SEQ ID NO: 2186 |
| TCACCTGT | GCCTCCCTCGCGCCATCAGTCACCTGTCATGCT |
| SEQ ID NO: 2187 | GCCTCCCGTAGGAGT |
| | SEQ ID NO: 2188 |
| TCACGACA | GCCTCCCTCGCGCCATCAGTCACGACACATGCT |
| SEQ ID NO: 2189 | GCCTCCCGTAGGAGT |
| | SEQ ID NO: 2190 |
| TCACGAGT | GCCTCCCTCGCGCCATCAGTCACGAGTCATGCT |
| SEQ ID NO: 2191 | GCCTCCCGTAGGAGT |
| | SEQ ID NO: 2192 |
| TCACGTCT | GCCTCCCTCGCGCCATCAGTCACGTCTCATGCT |
| SEQ ID NO: 2193 | GCCTCCCGTAGGAGT |
| | SEQ ID NO: 2194 |
| TCACGTGA | GCCTCCCTCGCGCCATCAGTCACGTGACATGCT |
| SEQ ID NO: 2195 | GCCTCCCGTAGGAGT |
| | SEQ ID NO: 2196 |
| TCACTCAC | GCCTCCCTCGCGCCATCAGTCACTCACCATGCT |
| SEQ ID NO: 2197 | GCCTCCCGTAGGAGT |
| | SEQ ID NO: 2198 |
| TCACTCTG | GCCTCCCTCGCGCCATCAGTCACTCTGCATGCT |
| SEQ ID NO: 2199 | GCCTCCCGTAGGAGT |
| | SEQ ID NO: 2200 |
| TCACTGAG | GCCTCCCTCGCGCCATCAGTCACTGAGCATGCT |
| SEQ ID NO: 2201 | GCCTCCCGTAGGAGT |
| | SEQ ID NO: 2202 |
| TCACTGTC | GCCTCCCTCGCGCCATCAGTCACTGTCCATGCT |
| SEQ ID NO: 2203 | GCCTCCCGTAGGAGT |
| | SEQ ID NO: 2204 |
| TCAGACAC | GCCTCCCTCGCGCCATCAGTCAGACACCATGCT |
| SEQ ID NO: 2205 | GCCTCCCGTAGGAGT |
| | SEQ ID NO: 2206 |
| TCAGACTG | GCCTCCCTCGCGCCATCAGTCAGACTGCATGCT |
| SEQ ID NO: 2207 | GCCTCCCGTAGGAGT |
| | SEQ ID NO: 2208 |
| TCAGAGAG | GCCTCCCTCGCGCCATCAGTCAGAGAGCATGCT |
| SEQ ID NO: 2209 | GCCTCCCGTAGGAGT |
| | SEQ ID NO: 2210 |
| TCAGAGTC | GCCTCCCTCGCGCCATCAGTCAGAGTCCATGCT |
| SEQ ID NO: 2211 | GCCTCCCGTAGGAGT |
| | SEQ ID NO: 2212 |
| TCAGCACA | GCCTCCCTCGCGCCATCAGTCAGCACACATGCT |
| SEQ ID NO: 2213 | GCCTCCCGTAGGAGT |
| | SEQ ID NO: 2214 |
| TCAGCAGT | GCCTCCCTCGCGCCATCAGTCAGCAGTCATGCT |
| SEQ ID NO: 2215 | GCCTCCCGTAGGAGT |
| | SEQ ID NO: 2216 |
| TCAGCTCT | GCCTCCCTCGCGCCATCAGTCAGCTCTCATGCT |
| SEQ ID NO: 2217 | GCCTCCCGTAGGAGT |
| | SEQ ID NO: 2218 |
| TCAGCTGA | GCCTCCCTCGCGCCATCAGTCAGCTGACATGCT |
| SEQ ID NO: 2219 | GCCTCCCGTAGGAGT |
| | SEQ ID NO: 2220 |
| TCAGGACT | GCCTCCCTCGCGCCATCAGTCAGGACTCATGCT |
| SEQ ID NO: 2221 | GCCTCCCGTAGGAGT |
| | SEQ ID NO: 2222 |
| TCAGGAGA | GCCTCCCTCGCGCCATCAGTCAGGAGACATGCT |
| SEQ ID NO: 2223 | GCCTCCCGTAGGAGT |
| | SEQ ID NO: 2224 |
| TCAGGTCA | GCCTCCCTCGCGCCATCAGTCAGGTCACATGCT |
| SEQ ID NO: 2225 | GCCTCCCGTAGGAGT |
| | SEQ ID NO: 2226 |
| TCAGGTGT | GCCTCCCTCGCGCCATCAGTCAGGTGTCATGCT |
| SEQ ID NO: 2227 | GCCTCCCGTAGGAGT |
| | SEQ ID NO: 2228 |
| TCAGTCAG | GCCTCCCTCGCGCCATCAGTCAGTCAGCATGCT |
| SEQ ID NO: 2229 | GCCTCCCGTAGGAGT |
| | SEQ ID NO: 2230 |
| TCAGTCTC | GCCTCCCTCGCGCCATCAGTCAGTCTCCATGCT |
| SEQ ID NO: 2231 | GCCTCCCGTAGGAGT |
| | SEQ ID NO: 2232 |
| TCAGTGAC | GCCTCCCTCGCGCCATCAGTCAGTGACCATGCT |
| SEQ ID NO: 2233 | GCCTCCCGTAGGAGT |
| | SEQ ID NO: 2234 |
| TCAGTGTG | GCCTCCCTCGCGCCATCAGTCAGTGTGCATGCT |
| SEQ ID NO: 2235 | GCCTCCCGTAGGAGT |
| | SEQ ID NO: 2236 |
| TCCAACCT | GCCTCCCTCGCGCCATCAGTCCAACCTCATGCT |
| SEQ ID NO: 2237 | GCCTCCCGTAGGAGT |
| | SEQ ID NO: 2238 |
| TCCAACGA | GCCTCCCTCGCGCCATCAGTCCAACGACATGCT |
| SEQ ID NO: 2239 | GCCTCCCGTAGGAGT |
| | SEQ ID NO: 2240 |
| TCCAAGCA | GCCTCCCTCGCGCCATCAGTCCAAGCACATGCT |
| SEQ ID NO: 2241 | GCCTCCCGTAGGAGT |
| | SEQ ID NO: 2242 |
| TCCAAGGT | GCCTCCCTCGCGCCATCAGTCCAAGGTCATGCT |
| SEQ ID NO: 2243 | GCCTCCCGTAGGAGT |
| | SEQ ID NO: 2244 |
| TCCACAAG | GCCTCCCTCGCGCCATCAGTCCACAAGCATGCT |
| SEQ ID NO: 2245 | GCCTCCCGTAGGAGT |
| | SEQ ID NO: 2246 |
| TCCACATC | GCCTCCCTCGCGCCATCAGTCCACATCCATGCT |
| SEQ ID NO: 2247 | GCCTCCCGTAGGAGT |
| | SEQ ID NO: 2248 |
| TCCACTAC | GCCTCCCTCGCGCCATCAGTCCACTACCATGCT |
| SEQ ID NO: 2249 | GCCTCCCGTAGGAGT |
| | SEQ ID NO: 2250 |
| TCCACTTG | GCCTCCCTCGCGCCATCAGTCCACTTGCATGCT |
| SEQ ID NO: 2251 | GCCTCCCGTAGGAGT |
| | SEQ ID NO: 2252 |
| TCCAGAAC | GCCTCCCTCGCGCCATCAGTCCAGAACCATGCT |
| SEQ ID NO: 2253 | GCCTCCCGTAGGAGT |
| | SEQ ID NO: 2254 |
| TCCAGATG | GCCTCCCTCGCGCCATCAGTCCAGATGCATGCT |
| SEQ ID NO: 2255 | GCCTCCCGTAGGAGT |
| | SEQ ID NO: 2256 |
| TCCAGTAG | GCCTCCCTCGCGCCATCAGTCCAGTAGCATGCT |
| SEQ ID NO: 2257 | GCCTCCCGTAGGAGT |
| | SEQ ID NO: 2258 |
| TCCAGTTC | GCCTCCCTCGCGCCATCAGTCCAGTTCCATGCT |
| SEQ ID NO: 2259 | GCCTCCCGTAGGAGT |
| | SEQ ID NO: 2260 |
| TCCATCCA | GCCTCCCTCGCGCCATCAGTCCATCCACATGCT |
| SEQ ID NO: 2261 | GCCTCCCGTAGGAGT |
| | SEQ ID NO: 2262 |
| TCCATCGT | GCCTCCCTCGCGCCATCAGTCCATCGTCATGCT |
| SEQ ID NO: 2263 | GCCTCCCGTAGGAGT |
| | SEQ ID NO: 2264 |
| TCCATGCT | GCCTCCCTCGCGCCATCAGTCCATGCTCATGCT |
| SEQ ID NO: 2265 | GCCTCCCGTAGGAGT |
| | SEQ ID NO: 2266 |
| TCCATGGA | GCCTCCCTCGCGCCATCAGTCCATGGACATGCT |
| SEQ ID NO: 2267 | GCCTCCCGTAGGAGT |
| | SEQ ID NO: 2268 |
| TCCTACCA | GCCTCCCTCGCGCCATCAGTCCTACCACATGCT |
| SEQ ID NO: 2669 | GCCTCCCGTAGGAGT |
| | SEQ ID NO: 2670 |
| TCCTACGT | GCCTCCCTCGCGCCATCAGTCCTACGTCATGCT |
| SEQ ID NO: 2671 | GCCTCCCGTAGGAGT |
| | SEQ ID NO: 2672 |
| TCCTAGCT | GCCTCCCTCGCGCCATCAGTCCTAGCTCATGCT |
| SEQ ID NO: 2673 | GCCTCCCGTAGGAGT |
| | SEQ ID NO: 2674 |
| TCCTAGGA | GCCTCCCTCGCGCCATCAGTCCTAGGACATGCT |
| SEQ ID NO: 2675 | GCCTCCCGTAGGAGT |
| | SEQ ID NO: 2676 |
| TCCTCAAC | GCCTCCCTCGCGCCATCAGTCCTCAACCATGCT |
| SEQ ID NO: 2677 | GCCTCCCGTAGGAGT |
| | SEQ ID NO: 2678 |
| TCCTCATG | GCCTCCCTCGCGCCATCAGTCCTCATGCATGCT |
| SEQ ID NO: 2679 | GCCTCCCGTAGGAGT |
| | SEQ ID NO: 2680 |
| TCCTCTAG | GCCTCCCTCGCGCCATCAGTCCTCTAGCATGCT |
| SEQ ID NO: 2681 | GCCTCCCGTAGGAGT |
| | SEQ ID NO: 2682 |
| TCCTCTTC | GCCTCCCTCGCGCCATCAGTCCTCTTCCATGCT |
| SEQ ID NO: 2683 | GCCTCCCGTAGGAGT |
| | SEQ ID NO: 2684 |
| TCCTGAAG | GCCTCCCTCGCGCCATCAGTCCTGAAGCATGCT |
| SEQ ID NO: 2685 | GCCTCCCGTAGGAGT |
| | SEQ ID NO: 2686 |
| TCCTGATC | GCCTCCCTCGCGCCATCAGTCCTGATCCATGCT |
| SEQ ID NO: 2687 | GCCTCCCGTAGGAGT |
| | SEQ ID NO: 2688 |
| TCCTGTAC | GCCTCCCTCGCGCCATCAGTCCTGTACCATGCT |
| SEQ ID NO: 2689 | GCCTCCCGTAGGAGT |
| | SEQ ID NO: 2690 |
| TCCTGTTG | GCCTCCCTCGCGCCATCAGTCCTGTTGCATGCT |
| SEQ ID NO: 2691 | GCCTCCCGTAGGAGT |
| | SEQ ID NO: 2692 |
| TCCTTCCT | GCCTCCCTCGCGCCATCAGTCCTTCCTCATGCT |
| SEQ ID NO: 2693 | GCCTCCCGTAGGAGT |
| | SEQ ID NO: 2694 |
| TCCTTCGA | GCCTCCCTCGCGCCATCAGTCCTTCGACATGCT |
| SEQ ID NO: 2695 | GCCTCCCGTAGGAGT |
| | SEQ ID NO: 2696 |
| TCCTTGCA | GCCTCCCTCGCGCCATCAGTCCTTGCACATGCT |
| SEQ ID NO: 2697 | GCCTCCCGTAGGAGT |
| | SEQ ID NO: 2698 |
| TCCTTGGT | GCCTCCCTCGCGCCATCAGTCCTTGGTCATGCT |
| SEQ ID NO: 2699 | GCCTCCCGTAGGAGT |
| | SEQ ID NO: 2700 |
| TCGAACCA | GCCTCCCTCGCGCCATCAGTCGAACCACATGCT |
| SEQ ID NO: 2701 | GCCTCCCGTAGGAGT |
| | SEQ ID NO: 2702 |
| TCGAACGT | GCCTCCCTCGCGCCATCAGTCGAACGTCATGCT |
| SEQ ID NO: 2703 | GCCTCCCGTAGGAGT |
| | SEQ ID NO: 2704 |
| TCGAAGCT | GCCTCCCTCGCGCCATCAGTCGAAGCTCATGCT |
| SEQ ID NO: 2705 | GCCTCCCGTAGGAGT |
| | SEQ ID NO: 2706 |
| TCGAAGGA | GCCTCCCTCGCGCCATCAGTCGAAGGACATGCT |
| SEQ ID NO: 2707 | GCCTCCCGTAGGAGT |
| | SEQ ID NO: 2708 |
| TCGACAAC | GCCTCCCTCGCGCCATCAGTCGACAACCATGCT |
| SEQ ID NO: 2709 | GCCTCCCGTAGGAGT |
| | SEQ ID NO: 2710 |
| TCGACATG | GCCTCCCTCGCGCCATCAGTCGACATGCATGCT |
| SEQ ID NO: 2711 | GCCTCCCGTAGGAGT |
| | SEQ ID NO: 2712 |
| TCGACTAG | GCCTCCCTCGCGCCATCAGTCGACTAGCATGCT |
| SEQ ID NO: 2713 | GCCTCCCGTAGGAGT |
| | SEQ ID NO: 2714 |
| TCGACTTC | GCCTCCCTCGCGCCATCAGTCGACTTCCATGCT |
| SEQ ID NO: 2715 | GCCTCCCGTAGGAGT |
| | SEQ ID NO: 2716 |
| TCGAGAAG | GCCTCCCTCGCGCCATCAGTCGAGAAGCATGCT |
| SEQ ID NO: 2717 | GCCTCCCGTAGGAGT |
| | SEQ ID NO: 2718 |
| TCGAGATC | GCCTCCCTCGCGCCATCAGTCGAGATCCATGCT |
| SEQ ID NO: 2719 | GCCTCCCGTAGGAGT |
| | SEQ ID NO: 2720 |
| TCGAGTAC | GCCTCCCTCGCGCCATCAGTCGAGTACCATGCT |
| SEQ ID NO: 2721 | GCCTCCCGTAGGAGT |
| | SEQ ID NO: 2722 |
| TCGAGTTG | GCCTCCCTCGCGCCATCAGTCGAGTTGCATGCT |
| SEQ ID NO: 2723 | GCCTCCCGTAGGAGT |
| | SEQ ID NO: 2724 |
| TCGATCCT | GCCTCCCTCGCGCCATCAGTCGATCCTCATGCT |
| SEQ ID NO: 2725 | GCCTCCCGTAGGAGT |
| | SEQ ID NO: 2726 |
| TCGATCGA | GCCTCCCTCGCGCCATCAGTCGATCGACATGCT |
| SEQ ID NO: 2727 | GCCTCCCGTAGGAGT |
| | SEQ ID NO: 2728 |
| TCGATGCA | GCCTCCCTCGCGCCATCAGTCGATGCACATGCT |
| SEQ ID NO: 2729 | GCCTCCCGTAGGAGT |
| | SEQ ID NO: 2730 |
| TCGATGGT | GCCTCCCTCGCGCCATCAGTCGATGGTCATGCT |
| SEQ ID NO: 2731 | GCCTCCCGTAGGAGT |
| | SEQ ID NO: 2732 |
| TCGTACCT | GCCTCCCTCGCGCCATCAGTCGTACCTCATGCT |
| SEQ ID NO: 2733 | GCCTCCCGTAGGAGT |
| | SEQ ID NO: 2734 |
| TCGTACGA | GCCTCCCTCGCGCCATCAGTCGTACGACATGCT |
| SEQ ID NO: 2735 | GCCTCCCGTAGGAGT |
| | SEQ ID NO: 2736 |
| TCGTAGCA | GCCTCCCTCGCGCCATCAGTCGTAGCACATGCT |
| SEQ ID NO: 2737 | GCCTCCCGTAGGAGT |
| | SEQ ID NO: 2738 |
| TCGTAGGT | GCCTCCCTCGCGCCATCAGTCGTAGGTCATGCT |
| SEQ ID NO: 2739 | GCCTCCCGTAGGAGT |
| | SEQ ID NO: 2740 |
| TCGTCAAG | GCCTCCCTCGCGCCATCAGTCGTCAAGCATGCT |
| SEQ ID NO: 2741 | GCCTCCCGTAGGAGT |
| | SEQ ID NO: 2742 |
| TCGTCATC | GCCTCCCTCGCGCCATCAGTCGTCATCCATGCT |
| SEQ ID NO: 2743 | GCCTCCCGTAGGAGT |
| | SEQ ID NO: 2744 |
| TCGTCTAC | GCCTCCCTCGCGCCATCAGTCGTCTACCATGCT |
| SEQ ID NO: 2745 | GCCTCCCGTAGGAGT |
| | SEQ ID NO: 2746 |
| TCGTCTTG | GCCTCCCTCGCGCCATCAGTCGTCTTGCATGCT |
| SEQ ID NO: 2747 | GCCTCCCGTAGGAGT |
| | SEQ ID NO: 2748 |
| TCGTGAAC | GCCTCCCTCGCGCCATCAGTCGTGAACCATGCT |
| SEQ ID NO: 2749 | GCCTCCCGTAGGAGT |
| | SEQ ID NO: 2750 |
| TCGTGATG | GCCTCCCTCGCGCCATCAGTCGTGATGCATGCT |
| SEQ ID NO: 2751 | GCCTCCCGTAGGAGT |
| | SEQ ID NO: 2752 |
| TCGTGTAG | GCCTCCCTCGCGCCATCAGTCGTGTAGCATGCT |
| SEQ ID NO: 2753 | GCCTCCCGTAGGAGT |
| | SEQ ID NO: 2754 |
| TCGTGTTC | GCCTCCCTCGCGCCATCAGTCGTGTTCCATGCT |
| SEQ ID NO: 2755 | GCCTCCCGTAGGAGT |
| | SEQ ID NO: 2756 |
| TCGTTCCA | GCCTCCCTCGCGCCATCAGTCGTTCCACATGCT |
| SEQ ID NO: 2757 | GCCTCCCGTAGGAGT |
| | SEQ ID NO: 2758 |
| TCGTTCGT | GCCTCCCTCGCGCCATCAGTCGTTCGTCATGCT |
| SEQ ID NO: 2759 | GCCTCCCGTAGGAGT |
| | SEQ ID NO: 2760 |
| TCGTTGCT | GCCTCCCTCGCGCCATCAGTCGTTGCTCATGCT |
| SEQ ID NO: 2761 | GCCTCCCGTAGGAGT |
| | SEQ ID NO: 2762 |
| TCGTTGGA | GCCTCCCTCGCGCCATCAGTCGTTGGACATGCT |
| SEQ ID NO: 2763 | GCCTCCCGTAGGAGT |
| | SEQ ID NO: 2764 |
| TCTCACAC | GCCTCCCTCGCGCCATCAGTCTCACACCATGCT |
| SEQ ID NO: 2765 | GCCTCCCGTAGGAGT |
| | SEQ ID NO: 2766 |
| TCTCACTG | GCCTCCCTCGCGCCATCAGTCTCACTGCATGCT |
| SEQ ID NO: 2767 | GCCTCCCGTAGGAGT |
| | SEQ ID NO: 2768 |
| TCTCAGAG | GCCTCCCTCGCGCCATCAGTCTCAGAGCATGCT |
| SEQ ID NO: 2769 | GCCTCCCGTAGGAGT |
| | SEQ ID NO: 2770 |
| TCTCAGTC | GCCTCCCTCGCGCCATCAGTCTCAGTCCATGCT |
| SEQ ID NO: 2771 | GCCTCCCGTAGGAGT |
| | SEQ ID NO: 2772 |
| TCTCCACA | GCCTCCCTCGCGCCATCAGTCTCCACACATGCT |
| SEQ ID NO: 2773 | GCCTCCCGTAGGAGT |
| | SEQ ID NO: 2774 |
| TCTCCAGT | GCCTCCCTCGCGCCATCAGTCTCCAGTCATGCT |
| SEQ ID NO: 2775 | GCCTCCCGTAGGAGT |
| | SEQ ID NO: 2776 |
| TCTCCTCT | GCCTCCCTCGCGCCATCAGTCTCCTCTCATGCT |
| SEQ ID NO: 2777 | GCCTCCCGTAGGAGT |
| | SEQ ID NO: 2778 |
| TCTCCTGA | GCCTCCCTCGCGCCATCAGTCTCCTGACATGCT |
| SEQ ID NO: 2779 | GCCTCCCGTAGGAGT |
| | SEQ ID NO: 2780 |
| TCTCGACT | GCCTCCCTCGCGCCATCAGTCTCGACTCATGCT |
| SEQ ID NO: 2781 | GCCTCCCGTAGGAGT |
| | SEQ ID NO: 2782 |
| TCTCGAGA | GCCTCCCTCGCGCCATCAGTCTCGAGACATGCT |
| SEQ ID NO: 2783 | GCCTCCCGTAGGAGT |
| | SEQ ID NO: 2784 |
| TCTCGTCA | GCCTCCCTCGCGCCATCAGTCTCGTCACATGCT |
| SEQ ID NO: 2785 | GCCTCCCGTAGGAGT |
| | SEQ ID NO: 2786 |
| TCTCGTGT | GCCTCCCTCGCGCCATCAGTCTCGTGTCATGCT |
| SEQ ID NO: 2787 | GCCTCCCGTAGGAGT |
| | SEQ ID NO: 2788 |
| TCTCTCAG | GCCTCCCTCGCGCCATCAGTCTCTCAGCATGCT |
| SEQ ID NO: 2789 | GCCTCCCGTAGGAGT |
| | SEQ ID NO: 2790 |
| TCTCTCTC | GCCTCCCTCGCGCCATCAGTCTCTCTCCATGCT |
| SEQ ID NO: 2791 | GCCTCCCGTAGGAGT |
| | SEQ ID NO: 2792 |
| TCTCTGAC | GCCTCCCTCGCGCCATCAGTCTCTGACCATGCT |
| SEQ ID NO: 2793 | GCCTCCCGTAGGAGT |
| | SEQ ID NO: 2794 |
| TCTCTGTG | GCCTCCCTCGCGCCATCAGTCTCTGTGCATGCT |
| SEQ ID NO: 2795 | GCCTCCCGTAGGAGT |
| | SEQ ID NO: 2796 |
| TCTGACAG | GCCTCCCTCGCGCCATCAGTCTGACAGCATGCT |
| SEQ ID NO: 2797 | GCCTCCCGTAGGAGT |
| | SEQ ID NO: 2798 |
| TCTGACTC | GCCTCCCTCGCGCCATCAGTCTGACTCCATGCT |
| SEQ ID NO: 2799 | GCCTCCCGTAGGAGT |
| | SEQ ID NO: 2800 |
| TCTGAGAC | GCCTCCCTCGCGCCATCAGTCTGAGACCATGCT |
| SEQ ID NO: 2801 | GCCTCCCGTAGGAGT |
| | SEQ ID NO: 2802 |
| TCTGAGTG | GCCTCCCTCGCGCCATCAGTCTGAGTGCATGCT |
| SEQ ID NO: 2803 | GCCTCCCGTAGGAGT |
| | SEQ ID NO: 2804 |
| TCTGCACT | GCCTCCCTCGCGCCATCAGTCTGCACTCATGCT |
| SEQ ID NO: 2805 | GCCTCCCGTAGGAGT |
| | SEQ ID NO: 2806 |
| TCTGCAGA | GCCTCCCTCGCGCCATCAGTCTGCAGACATGCT |
| SEQ ID NO: 2807 | GCCTCCCGTAGGAGT |
| | SEQ ID NO: 2808 |
| TCTGCTCA | GCCTCCCTCGCGCCATCAGTCTGCTCACATGCT |
| SEQ ID NO: 2809 | GCCTCCCGTAGGAGT |
| | SEQ ID NO: 2810 |
| TCTGCTGT | GCCTCCCTCGCGCCATCAGTCTGCTGTCATGCT |
| SEQ ID NO: 2811 | GCCTCCCGTAGGAGT |
| | SEQ ID NO: 2812 |
| TCTGGACA | GCCTCCCTCGCGCCATCAGTCTGGACACATGCT |
| SEQ ID NO: 2813 | GCCTCCCGTAGGAGT |
| | SEQ ID NO: 2814 |
| TCTGGAGT | GCCTCCCTCGCGCCATCAGTCTGGAGTCATGCT |
| SEQ ID NO: 2815 | GCCTCCCGTAGGAGT |
| | SEQ ID NO: 2816 |
| TCTGGTCT | GCCTCCCTCGCGCCATCAGTCTGGTCTCATGCT |
| SEQ ID NO: 2817 | GCCTCCCGTAGGAGT |
| | SEQ ID NO: 2818 |
| TCTGGTGA | GCCTCCCTCGCGCCATCAGTCTGGTGACATGCT |
| SEQ ID NO: 2819 | GCCTCCCGTAGGAGT |
| | SEQ ID NO: 2820 |
| TCTGTCAC | GCCTCCCTCGCGCCATCAGTCTGTCACCATGCT |
| SEQ ID NO: 2821 | GCCTCCCGTAGGAGT |
| | SEQ ID NO: 2822 |
| TCTGTCTG | GCCTCCCTCGCGCCATCAGTCTGTCTGCATGCT |
| SEQ ID NO: 2823 | GCCTCCCGTAGGAGT |
| | SEQ ID NO: 2824 |
| TCTGTGAG | GCCTCCCTCGCGCCATCAGTCTGTGAGCATGCT |
| SEQ ID NO: 2825 | GCCTCCCGTAGGAGT |
| | SEQ ID NO: 2826 |
| TCTGTGTC | GCCTCCCTCGCGCCATCAGTCTGTGTCCATGCT |
| SEQ ID NO: 2827 | GCCTCCCGTAGGAGT |
| | SEQ ID NO: 2828 |
| TGACACAC | GCCTCCCTCGCGCCATCAGTGACACACCATGCT |
| SEQ ID NO: 2829 | GCCTCCCGTAGGAGT |
| | SEQ ID NO: 2830 |
| TGACACTG | GCCTCCCTCGCGCCATCAGTGACACTGCATGCT |
| SEQ ID NO: 2831 | GCCTCCCGTAGGAGT |
| | SEQ ID NO: 2832 |
| TGACAGAG | GCCTCCCTCGCGCCATCAGTGACAGAGCATGCT |
| SEQ ID NO: 2833 | GCCTCCCGTAGGAGT |
| | SEQ ID NO: 2834 |
| TGACAGTC | GCCTCCCTCGCGCCATCAGTGACAGTCCATGCT |
| SEQ ID NO: 2835 | GCCTCCCGTAGGAGT |
| | SEQ ID NO: 2836 |
| TGACCACA | GCCTCCCTCGCGCCATCAGTGACCACACATGCT |
| SEQ ID NO: 2837 | GCCTCCCGTAGGAGT |
| | SEQ ID NO: 2838 |
| TGACCAGT | GCCTCCCTCGCGCCATCAGTGACCAGTCATGCT |
| SEQ ID NO: 2839 | GCCTCCCGTAGGAGT |
| | SEQ ID NO: 2840 |
| TGACCTCT | GCCTCCCTCGCGCCATCAGTGACCTCTCATGCT |
| SEQ ID NO: 2841 | GCCTCCCGTAGGAGT |
| | SEQ ID NO: 2842 |
| TGACCTGA | GCCTCCCTCGCGCCATCAGTGACCTGACATGCT |
| SEQ ID NO: 2843 | GCCTCCCGTAGGAGT |
| | SEQ ID NO: 2844 |
| TGACGACT | GCCTCCCTCGCGCCATCAGTGACGACTCATGCT |
| SEQ ID NO: 2845 | GCCTCCCGTAGGAGT |
| | SEQ ID NO: 2846 |
| TGACGAGA | GCCTCCCTCGCGCCATCAGTGACGAGACATGCT |
| SEQ ID NO: 2847 | GCCTCCCGTAGGAGT |
| | SEQ ID NO: 2848 |
| TGACGTCA | GCCTCCCTCGCGCCATCAGTGACGTCACATGCT |
| SEQ ID NO: 2849 | GCCTCCCGTAGGAGT |
| | SEQ ID NO: 2850 |
| TGACGTGT | GCCTCCCTCGCGCCATCAGTGACGTGTCATGCT |
| SEQ ID NO: 2851 | GCCTCCCGTAGGAGT |
| | SEQ ID NO: 2852 |
| TGACTCAG | GCCTCCCTCGCGCCATCAGTGACTCAGCATGCT |
| SEQ ID NO: 2853 | GCCTCCCGTAGGAGT |
| | SEQ ID NO: 2854 |
| TGACTCTC | GCCTCCCTCGCGCCATCAGTGACTCTCCATGCT |
| SEQ ID NO: 2855 | GCCTCCCGTAGGAGT |
| | SEQ ID NO: 2856 |
| TGACTGAC | GCCTCCCTCGCGCCATCAGTGACTGACCATGCT |
| SEQ ID NO: 2857 | GCCTCCCGTAGGAGT |
| | SEQ ID NO: 2858 |
| TGACTGTG | GCCTCCCTCGCGCCATCAGTGACTGTGCATGCT |
| SEQ ID NO: 2859 | GCCTCCCGTAGGAGT |
| | SEQ ID NO: 2860 |
| TGAGACAG | GCCTCCCTCGCGCCATCAGTGAGACAGCATGCT |
| SEQ ID NO: 2861 | GCCTCCCGTAGGAGT |
| | SEQ ID NO: 2862 |
| TGAGACTC | GCCTCCCTCGCGCCATCAGTGAGACTCCATGCT |
| SEQ ID NO: 2863 | GCCTCCCGTAGGAGT |
| | SEQ ID NO: 2864 |
| TGAGAGAC | GCCTCCCTCGCGCCATCAGTGAGAGACCATGCT |
| SEQ ID NO: 2865 | GCCTCCCGTAGGAGT |
| | SEQ ID NO: 2866 |
| TGAGAGTG | GCCTCCCTCGCGCCATCAGTGAGAGTGCATGCT |
| SEQ ID NO: 2867 | GCCTCCCGTAGGAGT |
| | SEQ ID NO: 2868 |
| TGAGCACT | GCCTCCCTCGCGCCATCAGTGAGCACTCATGCT |
| SEQ ID NO: 2869 | GCCTCCCGTAGGAGT |
| | SEQ ID NO: 2870 |
| TGAGCAGA | GCCTCCCTCGCGCCATCAGTGAGCAGACATGCT |
| SEQ ID NO: 2871 | GCCTCCCGTAGGAGT |
| | SEQ ID NO: 2872 |
| TGAGCTCA | GCCTCCCTCGCGCCATCAGTGAGCTCACATGCT |
| SEQ ID NO: 2873 | GCCTCCCGTAGGAGT |
| | SEQ ID NO: 2874 |
| TGAGCTGT | GCCTCCCTCGCGCCATCAGTGAGCTGTCATGCT |
| SEQ ID NO: 2875 | GCCTCCCGTAGGAGT |
| | SEQ ID NO: 2876 |
| TGAGGACA | GCCTCCCTCGCGCCATCAGTGAGGACACATGCT |
| SEQ ID NO: 2877 | GCCTCCCGTAGGAGT |
| | SEQ ID NO: 2878 |
| TGAGGAGT | GCCTCCCTCGCGCCATCAGTGAGGAGTCATGCT |
| SEQ ID NO: 2879 | GCCTCCCGTAGGAGT |
| | SEQ ID NO: 2880 |
| TGAGGTCT | GCCTCCCTCGCGCCATCAGTGAGGTCTCATGCT |
| SEQ ID NO: 2881 | GCCTCCCGTAGGAGT |
| | SEQ ID NO: 2882 |
| TGAGGTGA | GCCTCCCTCGCGCCATCAGTGAGGTGACATGCT |
| SEQ ID NO: 2883 | GCCTCCCGTAGGAGT |
| | SEQ ID NO: 2884 |
| TGAGTCAC | GCCTCCCTCGCGCCATCAGTGAGTCACCATGCT |
| SEQ ID NO: 2885 | GCCTCCCGTAGGAGT |
| | SEQ ID NO: 2886 |
| TGAGTCTG | GCCTCCCTCGCGCCATCAGTGAGTCTGCATGCT |
| SEQ ID NO: 2887 | GCCTCCCGTAGGAGT |
| | SEQ ID NO: 2888 |
| TGAGTGAG | GCCTCCCTCGCGCCATCAGTGAGTGAGCATGCT |
| SEQ ID NO: 2889 | GCCTCCCGTAGGAGT |
| | SEQ ID NO: 2890 |
| TGAGTGTC | GCCTCCCTCGCGCCATCAGTGAGTGTCCATGCT |
| SEQ ID NO: 2891 | GCCTCCCGTAGGAGT |
| | SEQ ID NO: 2892 |
| TGCAACCA | GCCTCCCTCGCGCCATCAGTGCAACCACATGCT |
| SEQ ID NO: 2893 | GCCTCCCGTAGGAGT |
| | SEQ ID NO: 2894 |
| TGCAACGT | GCCTCCCTCGCGCCATCAGTGCAACGTCATGCT |
| SEQ ID NO: 2895 | GCCTCCCGTAGGAGT |
| | SEQ ID NO: 2896 |
| TGCAAGCT | GCCTCCCTCGCGCCATCAGTGCAAGCTCATGCT |
| SEQ ID NO: 2897 | GCCTCCCGTAGGAGT |
| | SEQ ID NO: 2898 |
| TGCAAGGA | GCCTCCCTCGCGCCATCAGTGCAAGGACATGCT |
| SEQ ID NO: 2899 | GCCTCCCGTAGGAGT |
| | SEQ ID NO: 2900 |
| TGCACAAC | GCCTCCCTCGCGCCATCAGTGCACAACCATGCT |
| SEQ ID NO: 2901 | GCCTCCCGTAGGAGT |
| | SEQ ID NO: 2902 |
| TGCACATG | GCCTCCCTCGCGCCATCAGTGCACATGCATGCT |
| SEQ ID NO: 2903 | GCCTCCCGTAGGAGT |
| | SEQ ID NO: 2904 |
| TGCACTAG | GCCTCCCTCGCGCCATCAGTGCACTAGCATGCT |
| SEQ ID NO: 2905 | GCCTCCCGTAGGAGT |
| | SEQ ID NO: 2906 |
| TGCACTTC | GCCTCCCTCGCGCCATCAGTGCACTTCCATGCT |
| SEQ ID NO: 2907 | GCCTCCCGTAGGAGT |
| | SEQ ID NO: 2908 |
| TGCAGAAG | GCCTCCCTCGCGCCATCAGTGCAGAAGCATGCT |
| SEQ ID NO: 2909 | GCCTCCCGTAGGAGT |
| | SEQ ID NO: 2910 |
| TGCAGATC | GCCTCCCTCGCGCCATCAGTGCAGATCCATGCT |
| SEQ ID NO: 2911 | GCCTCCCGTAGGAGT |
| | SEQ ID NO: 2912 |
| TGCAGTAC | GCCTCCCTCGCGCCATCAGTGCAGTACCATGCT |
| SEQ ID NO: 2913 | GCCTCCCGTAGGAGT |
| | SEQ ID NO: 2914 |
| TGCAGTTG | GCCTCCCTCGCGCCATCAGTGCAGTTGCATGCT |
| SEQ ID NO: 2915 | GCCTCCCGTAGGAGT |
| | SEQ ID NO: 2916 |
| TGCATCCT | GCCTCCCTCGCGCCATCAGTGCATCCTCATGCT |
| SEQ ID NO: 2917 | GCCTCCCGTAGGAGT |
| | SEQ ID NO: 2918 |
| TGCATCGA | GCCTCCCTCGCGCCATCAGTGCATCGACATGCT |
| SEQ ID NO: 2919 | GCCTCCCGTAGGAGT |
| | SEQ ID NO: 2920 |
| TGCATGCA | GCCTCCCTCGCGCCATCAGTGCATGCACATGCT |
| SEQ ID NO: 2921 | GCCTCCCGTAGGAGT |
| | SEQ ID NO: 2922 |
| TGCATGGT | GCCTCCCTCGCGCCATCAGTGCATGGTCATGCT |
| SEQ ID NO: 2923 | GCCTCCCGTAGGAGT |
| | SEQ ID NO: 2924 |
| TGCTACCT | GCCTCCCTCGCGCCATCAGTGCTACCTCATGCT |
| SEQ ID NO: 2925 | GCCTCCCGTAGGAGT |
| | SEQ ID NO: 2926 |
| TGCTACGA | GCCTCCCTCGCGCCATCAGTGCTACGACATGCT |
| SEQ ID NO: 2927 | GCCTCCCGTAGGAGT |
| | SEQ ID NO: 2928 |
| TGCTAGCA | GCCTCCCTCGCGCCATCAGTGCTAGCACATGCT |
| SEQ ID NO: 2929 | GCCTCCCGTAGGAGT |
| | SEQ ID NO: 2930 |
| TGCTAGGT | GCCTCCCTCGCGCCATCAGTGCTAGGTCATGCT |
| SEQ ID NO: 2931 | GCCTCCCGTAGGAGT |
| | SEQ ID NO: 2932 |
| TGCTCAAG | GCCTCCCTCGCGCCATCAGTGCTCAAGCATGCT |
| SEQ ID NO: 2933 | GCCTCCCGTAGGAGT |
| | SEQ ID NO: 2934 |
| TGCTCATC | GCCTCCCTCGCGCCATCAGTGCTCATCCATGCT |
| SEQ ID NO: 2935 | GCCTCCCGTAGGAGT |
| | SEQ ID NO: 2936 |
| TGCTCTAC | GCCTCCCTCGCGCCATCAGTGCTCTACCATGCT |
| SEQ ID NO: 2937 | GCCTCCCGTAGGAGT |
| | SEQ ID NO: 2938 |
| TGCTCTTG | GCCTCCCTCGCGCCATCAGTGCTCTTGCATGCT |
| SEQ ID NO: 2939 | GCCTCCCGTAGGAGT |
| | SEQ ID NO: 2940 |
| TGCTGAAC | GCCTCCCTCGCGCCATCAGTGCTGAACCATGCT |
| SEQ ID NO: 2941 | GCCTCCCGTAGGAGT |
| | SEQ ID NO: 2942 |
| TGCTGATG | GCCTCCCTCGCGCCATCAGTGCTGATGCATGCT |
| SEQ ID NO: 2943 | GCCTCCCGTAGGAGT |
| | SEQ ID NO: 2944 |
| TGCTGTAG | GCCTCCCTCGCGCCATCAGTGCTGTAGCATGCT |
| SEQ ID NO: 2945 | GCCTCCCGTAGGAGT |
| | SEQ ID NO: 2946 |
| TGCTGTTC | GCCTCCCTCGCGCCATCAGTGCTGTTCCATGCT |
| SEQ ID NO: 2947 | GCCTCCCGTAGGAGT |
| | SEQ ID NO: 2948 |
| TGCTTCCA | GCCTCCCTCGCGCCATCAGTGCTTCCACATGCT |
| SEQ ID NO: 2949 | GCCTCCCGTAGGAGT |
| | SEQ ID NO: 2950 |
| TGCTTCGT | GCCTCCCTCGCGCCATCAGTGCTTCGTCATGCT |
| SEQ ID NO: 2951 | GCCTCCCGTAGGAGT |
| | SEQ ID NO: 2952 |
| TGCTTGCT | GCCTCCCTCGCGCCATCAGTGCTTGCTCATGCT |
| SEQ ID NO: 2953 | GCCTCCCGTAGGAGT |
| | SEQ ID NO: 2954 |
| TGCTTGGA | GCCTCCCTCGCGCCATCAGTGCTTGGACATGCT |
| SEQ ID NO: 2955 | GCCTCCCGTAGGAGT |
| | SEQ ID NO: 2956 |
| TGGAACCT | GCCTCCCTCGCGCCATCAGTGGAACCTCATGCT |
| SEQ ID NO: 2957 | GCCTCCCGTAGGAGT |
| | SEQ ID NO: 2958 |
| TGGAACGA | GCCTCCCTCGCGCCATCAGTGGAACGACATGCT |
| SEQ ID NO: 2959 | GCCTCCCGTAGGAGT |
| | SEQ ID NO: 2960 |
| TGGAAGCA | GCCTCCCTCGCGCCATCAGTGGAAGCACATGCT |
| SEQ ID NO: 2961 | GCCTCCCGTAGGAGT |
| | SEQ ID NO: 2962 |
| TGGAAGGT | GCCTCCCTCGCGCCATCAGTGGAAGGTCATGCT |
| SEQ ID NO: 2963 | GCCTCCCGTAGGAGT |
| | SEQ ID NO: 2964 |
| TGGACAAG | GCCTCCCTCGCGCCATCAGTGGACAAGCATGCT |
| SEQ ID NO: 2965 | GCCTCCCGTAGGAGT |
| | SEQ ID NO: 2966 |
| TGGACATC | GCCTCCCTCGCGCCATCAGTGGACATCCATGCT |
| SEQ ID NO: 2967 | GCCTCCCGTAGGAGT |
| | SEQ ID NO: 2968 |
| TGGACTAC | GCCTCCCTCGCGCCATCAGTGGACTACCATGCT |
| SEQ ID NO: 2969 | GCCTCCCGTAGGAGT |
| | SEQ ID NO: 2970 |
| TGGACTTG | GCCTCCCTCGCGCCATCAGTGGACTTGCATGCT |
| SEQ ID NO: 2971 | GCCTCCCGTAGGAGT |
| | SEQ ID NO: 2972 |
| TGGAGAAC | GCCTCCCTCGCGCCATCAGTGGAGAACCATGCT |
| SEQ ID NO: 2973 | GCCTCCCGTAGGAGT |
| | SEQ ID NO: 2974 |
| TGGAGATG | GCCTCCCTCGCGCCATCAGTGGAGATGCATGCT |
| SEQ ID NO: 2975 | GCCTCCCGTAGGAGT |
| | SEQ ID NO: 2976 |
| TGGAGTAG | GCCTCCCTCGCGCCATCAGTGGAGTAGCATGCT |
| SEQ ID NO: 2977 | GCCTCCCGTAGGAGT |
| | SEQ ID NO: 2978 |
| TGGAGTTC | GCCTCCCTCGCGCCATCAGTGGAGTTCCATGCT |
| SEQ ID NO: 2979 | GCCTCCCGTAGGAGT |
| | SEQ ID NO: 2980 |
| TGGATCCA | GCCTCCCTCGCGCCATCAGTGGATCCACATGCT |
| SEQ ID NO: 2981 | GCCTCCCGTAGGAGT |
| | SEQ ID NO: 2982 |
| TGGATCGT | GCCTCCCTCGCGCCATCAGTGGATCGTCATGCT |
| SEQ ID NO: 2983 | GCCTCCCGTAGGAGT |
| | SEQ ID NO: 2984 |
| TGGATGCT | GCCTCCCTCGCGCCATCAGTGGATGCTCATGCT |
| SEQ ID NO: 2985 | GCCTCCCGTAGGAGT |
| | SEQ ID NO: 2986 |
| TGGATGGA | GCCTCCCTCGCGCCATCAGTGGATGGACATGCT |
| SEQ ID NO: 2987 | GCCTCCCGTAGGAGT |
| | SEQ ID NO: 2988 |
| TGGTACCA | GCCTCCCTCGCGCCATCAGTGGTACCACATGCT |
| SEQ ID NO: 2989 | GCCTCCCGTAGGAGT |
| | SEQ ID NO: 2990 |
| TGGTACGT | GCCTCCCTCGCGCCATCAGTGGTACGTCATGCT |
| SEQ ID NO: 2991 | GCCTCCCGTAGGAGT |
| | SEQ ID NO: 2992 |
| TGGTAGCT | GCCTCCCTCGCGCCATCAGTGGTAGCTCATGCT |
| SEQ ID NO: 2993 | GCCTCCCGTAGGAGT |
| | SEQ ID NO: 2994 |
| TGGTAGGA | GCCTCCCTCGCGCCATCAGTGGTAGGACATGCT |
| SEQ ID NO: 2995 | GCCTCCCGTAGGAGT |
| | SEQ ID NO: 2996 |
| TGGTCAAC | GCCTCCCTCGCGCCATCAGTGGTCAACCATGCT |
| SEQ ID NO: 2997 | GCCTCCCGTAGGAGT |
| | SEQ ID NO: 2998 |
| TGGTCATG | GCCTCCCTCGCGCCATCAGTGGTCATGCATGCT |
| SEQ ID NO: 2999 | GCCTCCCGTAGGAGT |
| | SEQ ID NO: 3000 |
| TGGTCTAG | GCCTCCCTCGCGCCATCAGTGGTCTAGCATGCT |
| SEQ ID NO: 3001 | GCCTCCCGTAGGAGT |
| | SEQ ID NO: 3002 |
| TGGTCTTC | GCCTCCCTCGCGCCATCAGTGGTCTTCCATGCT |
| SEQ ID NO: 3003 | GCCTCCCGTAGGAGT |
| | SEQ ID NO: 3004 |
| TGGTGAAG | GCCTCCCTCGCGCCATCAGTGGTGAAGCATGCT |
| SEQ ID NO: 3005 | GCCTCCCGTAGGAGT |
| | SEQ ID NO: 3006 |
| TGGTGATC | GCCTCCCTCGCGCCATCAGTGGTGATCCATGCT |
| SEQ ID NO: 3007 | GCCTCCCGTAGGAGT |
| | SEQ ID NO: 3008 |
| TGGTGTAC | GCCTCCCTCGCGCCATCAGTGGTGTACCATGCT |
| SEQ ID NO: 3009 | GCCTCCCGTAGGAGT |
| | SEQ ID NO: 3010 |
| TGGTGTTG | GCCTCCCTCGCGCCATCAGTGGTGTTGCATGCT |
| SEQ ID NO: 3011 | GCCTCCCGTAGGAGT |
| | SEQ ID NO: 3012 |
| TGGTTCCT | GCCTCCCTCGCGCCATCAGTGGTTCCTCATGCT |
| SEQ ID NO: 3013 | GCCTCCCGTAGGAGT |
| | SEQ ID NO: 3014 |
| TGGTTCGA | GCCTCCCTCGCGCCATCAGTGGTTCGACATGCT |
| SEQ ID NO: 3015 | GCCTCCCGTAGGAGT |
| | SEQ ID NO: 3016 |
| TGGTTGCA | GCCTCCCTCGCGCCATCAGTGGTTGCACATGCT |
| SEQ ID NO: 3017 | GCCTCCCGTAGGAGT |
| | SEQ ID NO: 3018 |
| TGGTTGGT | GCCTCCCTCGCGCCATCAGTGGTTGGTCATGCT |
| SEQ ID NO: 3019 | GCCTCCCGTAGGAGT |
| | SEQ ID NO: 3020 |
| TGTCACAG | GCCTCCCTCGCGCCATCAGTGTCACAGCATGCT |
| SEQ ID NO: 3021 | GCCTCCCGTAGGAGT |
| | SEQ ID NO: 3022 |
| TGTCACTC | GCCTCCCTCGCGCCATCAGTGTCACTCCATGCT |
| SEQ ID NO: 3023 | GCCTCCCGTAGGAGT |
| | SEQ ID NO: 3024 |
| TGTCAGAC | GCCTCCCTCGCGCCATCAGTGTCAGACCATGCT |
| SEQ ID NO: 3025 | GCCTCCCGTAGGAGT |
| | SEQ ID NO: 3026 |
| TGTCAGTG | GCCTCCCTCGCGCCATCAGTGTCAGTGCATGCT |
| SEQ ID NO: 3027 | GCCTCCCGTAGGAGT |
| | SEQ ID NO: 3028 |
| TGTCCACT | GCCTCCCTCGCGCCATCAGTGTCCACTCATGCT |
| SEQ ID NO: 3029 | GCCTCCCGTAGGAGT |
| | SEQ ID NO: 3030 |
| TGTCCAGA | GCCTCCCTCGCGCCATCAGTGTCCAGACATGCT |
| SEQ ID NO: 3031 | GCCTCCCGTAGGAGT |
| | SEQ ID NO: 3032 |
| TGTCCTCA | GCCTCCCTCGCGCCATCAGTGTCCTCACATGCT |
| SEQ ID NO: 3033 | GCCTCCCGTAGGAGT |
| | SEQ ID NO: 3034 |
| TGTCCTGT | GCCTCCCTCGCGCCATCAGTGTCCTGTCATGCT |
| SEQ ID NO: 3035 | GCCTCCCGTAGGAGT |
| | SEQ ID NO: 3036 |
| TGTCGACA | GCCTCCCTCGCGCCATCAGTGTCGACACATGCT |
| SEQ ID NO: 3037 | GCCTCCCGTAGGAGT |
| | SEQ ID NO: 3038 |
| TGTCGAGT | GCCTCCCTCGCGCCATCAGTGTCGAGTCATGCT |
| SEQ ID NO: 3039 | GCCTCCCGTAGGAGT |
| | SEQ ID NO: 3040 |
| TGTCGTCT | GCCTCCCTCGCGCCATCAGTGTCGTCTCATGCT |
| SEQ ID NO: 3041 | GCCTCCCGTAGGAGT |
| | SEQ ID NO: 3042 |
| TGTCGTGA | GCCTCCCTCGCGCCATCAGTGTCGTGACATGCT |
| SEQ ID NO: 3043 | GCCTCCCGTAGGAGT |
| | SEQ ID NO: 3044 |
| TGTCTCAC | GCCTCCCTCGCGCCATCAGTGTCTCACCATGCT |
| SEQ ID NO: 3045 | GCCTCCCGTAGGAGT |
| | SEQ ID NO: 3046 |
| TGTCTCTG | GCCTCCCTCGCGCCATCAGTGTCTCTGCATGCT |
| SEQ ID NO: 3047 | GCCTCCCGTAGGAGT |
| | SEQ ID NO: 3048 |
| TGTCTGAG | GCCTCCCTCGCGCCATCAGTGTCTGAGCATGCT |
| SEQ ID NO: 3049 | GCCTCCCGTAGGAGT |
| | SEQ ID NO: 3050 |
| TGTCTGTC | GCCTCCCTCGCGCCATCAGTGTCTGTCCATGCT |
| SEQ ID NO: 3051 | GCCTCCCGTAGGAGT |
| | SEQ ID NO: 3052 |
| TGTGACAC | GCCTCCCTCGCGCCATCAGTGTGACACCATGCT |
| SEQ ID NO: 3053 | GCCTCCCGTAGGAGT |
| | SEQ ID NO: 3054 |
| TGTGACTG | GCCTCCCTCGCGCCATCAGTGTGACTGCATGCT |
| SEQ ID NO: 3055 | GCCTCCCGTAGGAGT |
| | SEQ ID NO: 3056 |
| TGTGAGAG | GCCTCCCTCGCGCCATCAGTGTGAGAGCATGCT |
| SEQ ID NO: 3057 | GCCTCCCGTAGGAGT |
| | SEQ ID NO: 3058 |
| TGTGAGTC | GCCTCCCTCGCGCCATCAGTGTGAGTCCATGCT |
| SEQ ID NO: 3059 | GCCTCCCGTAGGAGT |
| | SEQ ID NO: 3060 |
| TGTGCACA | GCCTCCCTCGCGCCATCAGTGTGCACACATGCT |
| SEQ ID NO: 3061 | GCCTCCCGTAGGAGT |
| | SEQ ID NO: 3062 |
| TGTGCAGT | GCCTCCCTCGCGCCATCAGTGTGCAGTCATGCT |
| SEQ ID NO: 3063 | GCCTCCCGTAGGAGT |
| | SEQ ID NO: 3064 |
| TGTGCTCT | GCCTCCCTCGCGCCATCAGTGTGCTCTCATGCT |
| SEQ ID NO: 3065 | GCCTCCCGTAGGAGT |
| | SEQ ID NO: 3066 |
| TGTGCTGA | GCCTCCCTCGCGCCATCAGTGTGCTGACATGCT |
| SEQ ID NO: 3067 | GCCTCCCGTAGGAGT |
| | SEQ ID NO: 3068 |
| TGTGGACT | GCCTCCCTCGCGCCATCAGTGTGGACTCATGCT |
| SEQ ID NO: 3069 | GCCTCCCGTAGGAGT |
| | SEQ ID NO: 3070 |
| TGTGGAGA | GCCTCCCTCGCGCCATCAGTGTGGAGACATGCT |
| SEQ ID NO: 3071 | GCCTCCCGTAGGAGT |
| | SEQ ID NO: 3072 |
| TGTGGTCA | GCCTCCCTCGCGCCATCAGTGTGGTCACATGCT |
| SEQ ID NO: 3073 | GCCTCCCGTAGGAGT |
| | SEQ ID NO: 3074 |
| TGTGGTGT | GCCTCCCTCGCGCCATCAGTGTGGTGTCATGCT |
| SEQ ID NO: 3075 | GCCTCCCGTAGGAGT |
| | SEQ ID NO: 3076 |
| TGTGTCAG | GCCTCCCTCGCGCCATCAGTGTGTCAGCATGCT |
| SEQ ID NO: 3077 | GCCTCCCGTAGGAGT |
| | SEQ ID NO: 3078 |
| TGTGTCTC | GCCTCCCTCGCGCCATCAGTGTGTCTCCATGCT |
| SEQ ID NO: 3079 | GCCTCCCGTAGGAGT |
| | SEQ ID NO: 3080 |
| TGTGTGAC | GCCTCCCTCGCGCCATCAGTGTGTGACCATGCT |
| SEQ ID NO: 3081 | GCCTCCCGTAGGAGT |
| | SEQ ID NO: 3082 |
| TGTGTGTG | GCCTCCCTCGCGCCATCAGTGTGTGTGCATGCT |
| SEQ ID NO: 3083 | GCCTCCCGTAGGAGT |
| | SEQ ID NO: 3084 |
| TTAACCGG | GCCTCCCTCGCGCCATCAGTTAACCGGCATGCT |
| SEQ ID NO: 3085 | GCCTCCCGTAGGAGT |
| | SEQ ID NO: 3086 |
| TTAACGCG | GCCTCCCTCGCGCCATCAGTTAACGCGCATGCT |
| SEQ ID NO: 3087 | GCCTCCCGTAGGAGT |
| | SEQ ID NO: 3088 |
| TTAACGGC | GCCTCCCTCGCGCCATCAGTTAACGGCCATGCT |
| SEQ ID NO: 3089 | GCCTCCCGTAGGAGT |
| | SEQ ID NO: 3090 |
| TTAAGCCG | GCCTCCCTCGCGCCATCAGTTAAGCCGCATGCT |
| SEQ ID NO: 3091 | GCCTCCCGTAGGAGT |
| | SEQ ID NO: 3092 |
| TTAAGCGC | GCCTCCCTCGCGCCATCAGTTAAGCGCCATGCT |
| SEQ ID NO: 3093 | GCCTCCCGTAGGAGT |
| | SEQ ID NO: 3094 |
| TTAAGGCC | GCCTCCCTCGCGCCATCAGTTAAGGCCCATGCT |
| SEQ ID NO: 3095 | GCCTCCCGTAGGAGT |
| | SEQ ID NO: 3096 |
| TTATCCGC | GCCTCCCTCGCGCCATCAGTTATCCGCCATGCT |
| SEQ ID NO: 3097 | GCCTCCCGTAGGAGT |
| | SEQ ID NO: 3098 |
| TTATCGCC | GCCTCCCTCGCGCCATCAGTTATCGCCCATGCT |
| SEQ ID NO: 3099 | GCCTCCCGTAGGAGT |
| | SEQ ID NO: 3100 |
| TTATGCGG | GCCTCCCTCGCGCCATCAGTTATGCGGCATGCT |
| SEQ ID NO: 3101 | GCCTCCCGTAGGAGT |
| | SEQ ID NO: 3102 |
| TTATGGCG | GCCTCCCTCGCGCCATCAGTTATGGCGCATGCT |
| SEQ ID NO: 3103 | GCCTCCCGTAGGAGT |
| | SEQ ID NO: 3104 |
| TTCCAACC | GCCTCCCTCGCGCCATCAGTTCCAACCCATGCT |
| SEQ ID NO: 3105 | GCCTCCCGTAGGAGT |
| | SEQ ID NO: 3106 |
| TTCCAAGG | GCCTCCCTCGCGCCATCAGTTCCAAGGCATGCT |
| SEQ ID NO: 3107 | GCCTCCCGTAGGAGT |
| | SEQ ID NO: 3108 |
| TTCCATCG | GCCTCCCTCGCGCCATCAGTTCCATCGCATGCT |
| SEQ ID NO: 3109 | GCCTCCCGTAGGAGT |
| | SEQ ID NO: 3110 |
| TTCCATGC | GCCTCCCTCGCGCCATCAGTTCCATGCCATGCT |
| SEQ ID NO: 3111 | GCCTCCCGTAGGAGT |
| | SEQ ID NO: 3112 |
| TTCCGCAT | GCCTCCCTCGCGCCATCAGTTCCGCATCATGCT |
| SEQ ID NO: 3113 | GCCTCCCGTAGGAGT |
| | SEQ ID NO: 3114 |
| TTCCGCTA | GCCTCCCTCGCGCCATCAGTTCCGCTACATGCT |
| SEQ ID NO: 3115 | GCCTCCCGTAGGAGT |
| | SEQ ID NO: 3116 |
| TTCCGGAA | GCCTCCCTCGCGCCATCAGTTCCGGAACATGCT |
| SEQ ID NO: 3117 | GCCTCCCGTAGGAGT |
| | SEQ ID NO: 3118 |
| TTCCGGTT | GCCTCCCTCGCGCCATCAGTTCCGGTTCATGCT |
| SEQ ID NO: 3119 | GCCTCCCGTAGGAGT |
| | SEQ ID NO: 3120 |
| TTCCTACG | GCCTCCCTCGCGCCATCAGTTCCTACGCATGCT |
| SEQ ID NO: 3121 | GCCTCCCGTAGGAGT |
| | SEQ ID NO: 3122 |
| TTCCTAGC | GCCTCCCTCGCGCCATCAGTTCCTAGCCATGCT |
| SEQ ID NO: 3123 | GCCTCCCGTAGGAGT |
| | SEQ ID NO: 3124 |
| TTCCTTCC | GCCTCCCTCGCGCCATCAGTTCCTTCCCATGCT |
| SEQ ID NO: 3125 | GCCTCCCGTAGGAGT |
| | SEQ ID NO: 3126 |
| TTCCTTGG | GCCTCCCTCGCGCCATCAGTTCCTTGGCATGCT |
| SEQ ID NO: 3127 | GCCTCCCGTAGGAGT |
| | SEQ ID NO: 3128 |
| TTCGAACG | GCCTCCCTCGCGCCATCAGTTCGAACGCATGCT |
| SEQ ID NO: 3129 | GCCTCCCGTAGGAGT |
| | SEQ ID NO: 3130 |
| TTCGAAGC | GCCTCCCTCGCGCCATCAGTTCGAAGCCATGCT |
| SEQ ID NO: 3131 | GCCTCCCGTAGGAGT |
| | SEQ ID NO: 3132 |
| TTCGATCC | GCCTCCCTCGCGCCATCAGTTCGATCCCATGCT |
| SEQ ID NO: 3133 | GCCTCCCGTAGGAGT |
| | SEQ ID NO: 3134 |
| TTCGATGG | GCCTCCCTCGCGCCATCAGTTCGATGGCATGCT |
| SEQ ID NO: 3135 | GCCTCCCGTAGGAGT |
| | SEQ ID NO: 3136 |
| TTCGCCAT | GCCTCCCTCGCGCCATCAGTTCGCCATCATGCT |
| SEQ ID NO: 3137 | GCCTCCCGTAGGAGT |
| | SEQ ID NO: 3138 |
| TTCGCCTA | GCCTCCCTCGCGCCATCAGTTCGCCTACATGCT |
| SEQ ID NO: 3139 | GCCTCCCGTAGGAGT |
| | SEQ ID NO: 3140 |
| TTCGCGAA | GCCTCCCTCGCGCCATCAGTTCGCGAACATGCT |
| SEQ ID NO: 3141 | GCCTCCCGTAGGAGT |
| | SEQ ID NO: 3142 |
| TTCGCGTT | GCCTCCCTCGCGCCATCAGTTCGCGTTCATGCT |
| SEQ ID NO: 3143 | GCCTCCCGTAGGAGT |
| | SEQ ID NO: 3144 |
| TTCGGCAA | GCCTCCCTCGCGCCATCAGTTCGGCAACATGCT |
| SEQ ID NO: 3145 | GCCTCCCGTAGGAGT |
| | SEQ ID NO: 3146 |
| TTCGGCTT | GCCTCCCTCGCGCCATCAGTTCGGCTTCATGCT |
| SEQ ID NO: 3147 | GCCTCCCGTAGGAGT |
| | SEQ ID NO: 3148 |
| TTCGTACC | GCCTCCCTCGCGCCATCAGTTCGTACCCATGCT |
| SEQ ID NO: 3149 | GCCTCCCGTAGGAGT |
| | SEQ ID NO: 3140 |
| TTCGTAGG | GCCTCCCTCGCGCCATCAGTTCGTAGGCATGCT |
| SEQ ID NO: 3141 | GCCTCCCGTAGGAGT |
| | SEQ ID NO: 3142 |
| TTCGTTCG | GCCTCCCTCGCGCCATCAGTTCGTTCGCATGCT |
| SEQ ID NO: 3143 | GCCTCCCGTAGGAGT |
| | SEQ ID NO: 3144 |
| TTCGTTGC | GCCTCCCTCGCGCCATCAGTTCGTTGCCATGCT |
| SEQ ID NO: 3145 | GCCTCCCGTAGGAGT |
| | SEQ ID NO: 3146 |
| TTGCAACG | GCCTCCCTCGCGCCATCAGTTGCAACGCATGCT |
| SEQ ID NO: 3147 | GCCTCCCGTAGGAGT |
| | SEQ ID NO: 3148 |
| TTGCAAGC | GCCTCCCTCGCGCCATCAGTTGCAAGCCATGCT |
| SEQ ID NO: 3149 | GCCTCCCGTAGGAGT |
| | SEQ ID NO: 3150 |
| TTGCATCC | GCCTCCCTCGCGCCATCAGTTGCATCCCATGCT |
| SEQ ID NO: 3151 | GCCTCCCGTAGGAGT |
| | SEQ ID NO: 3152 |
| TTGCATGG | GCCTCCCTCGCGCCATCAGTTGCATGGCATGCT |
| SEQ ID NO: 3153 | GCCTCCCGTAGGAGT |
| | SEQ ID NO: 3154 |
| TTGCCGAA | GCCTCCCTCGCGCCATCAGTTGCCGAACATGCT |
| SEQ ID NO: 3155 | GCCTCCCGTAGGAGT |
| | SEQ ID NO: 3156 |
| TTGCCGTT | GCCTCCCTCGCGCCATCAGTTGCCGTTCATGCT |
| SEQ ID NO: 3157 | GCCTCCCGTAGGAGT |
| | SEQ ID NO: 3158 |
| TTGCGCAA | GCCTCCCTCGCGCCATCAGTTGCGCAACATGCT |
| SEQ ID NO: 3159 | GCCTCCCGTAGGAGT |
| | SEQ ID NO: 3160 |
| TTGCGCTT | GCCTCCCTCGCGCCATCAGTTGCGCTTCATGCT |
| SEQ ID NO: 3161 | GCCTCCCGTAGGAGT |
| | SEQ ID NO: 3162 |
| TTGCGGAT | GCCTCCCTCGCGCCATCAGTTGCGGATCATGCT |
| SEQ ID NO: 3163 | GCCTCCCGTAGGAGT |
| | SEQ ID NO: 3164 |
| TTGCGGTA | GCCTCCCTCGCGCCATCAGTTGCGGTACATGCT |
| SEQ ID NO: 3165 | GCCTCCCGTAGGAGT |
| | SEQ ID NO: 3166 |
| TTGCTACC | GCCTCCCTCGCGCCATCAGTTGCTACCCATGCT |
| SEQ ID NO: 3167 | GCCTCCCGTAGGAGT |
| | SEQ ID NO: 3168 |
| TTGCTAGG | GCCTCCCTCGCGCCATCAGTTGCTAGGCATGCT |
| SEQ ID NO: 3169 | GCCTCCCGTAGGAGT |
| | SEQ ID NO: 3170 |
| TTGCTTCG | GCCTCCCTCGCGCCATCAGTTGCTTCGCATGCT |
| SEQ ID NO: 3171 | GCCTCCCGTAGGAGT |
| | SEQ ID NO: 3172 |
| TTGCTTGC | GCCTCCCTCGCGCCATCAGTTGCTTGCCATGCT |
| SEQ ID NO: 3173 | GCCTCCCGTAGGAGT |
| | SEQ ID NO: 3174 |
| TTGGAACC | GCCTCCCTCGCGCCATCAGTTGGAACCCATGCT |
| SEQ ID NO: 3175 | GCCTCCCGTAGGAGT |
| | SEQ ID NO: 3176 |
| TTGGAAGG | GCCTCCCTCGCGCCATCAGTTGGAAGGCATGCT |
| SEQ ID NO: 3177 | GCCTCCCGTAGGAGT |
| | SEQ ID NO: 3178 |
| TTGGATCG | GCCTCCCTCGCGCCATCAGTTGGATCGCATGCT |
| SEQ ID NO: 3179 | GCCTCCCGTAGGAGT |
| | SEQ ID NO: 3180 |
| TTGGATGC | GCCTCCCTCGCGCCATCAGTTGGATGCCATGCT |
| SEQ ID NO: 3181 | GCCTCCCGTAGGAGT |
| | SEQ ID NO: 3182 |
| TTGGCCAA | GCCTCCCTCGCGCCATCAGTTGGCCAACATGCT |
| SEQ ID NO: 3183 | GCCTCCCGTAGGAGT |
| | SEQ ID NO: 3184 |
| TTGGCCTT | GCCTCCCTCGCGCCATCAGTTGGCCTTCATGCT |
| SEQ ID NO: 3185 | GCCTCCCGTAGGAGT |
| | SEQ ID NO: 3186 |
| TTGGCGAT | GCCTCCCTCGCGCCATCAGTTGGCGATCATGCT |
| SEQ ID NO: 3187 | GCCTCCCGTAGGAGT |
| | SEQ ID NO: 3188 |
| TTGGCGTA | GCCTCCCTCGCGCCATCAGTTGGCGTACATGCT |
| SEQ ID NO: 3189 | GCCTCCCGTAGGAGT |
| | SEQ ID NO: 3190 |
| TTGGTACG | GCCTCCCTCGCGCCATCAGTTGGTACGCATGCT |
| SEQ ID NO: 3191 | GCCTCCCGTAGGAGT |
| | SEQ ID NO: 3192 |
| TTGGTAGC | GCCTCCCTCGCGCCATCAGTTGGTAGCCATGCT |
| SEQ ID NO: 3193 | GCCTCCCGTAGGAGT |
| | SEQ ID NO: 3194 |
| TTGGTTCC | GCCTCCCTCGCGCCATCAGTTGGTTCCCATGCT |
| SEQ ID NO: 3195 | GCCTCCCGTAGGAGT |
| | SEQ ID NO: 3196 |
| TTGGTTGG | GCCTCCCTCGCGCCATCAGTTGGTTGGCATGCT |
| SEQ ID NO: 3197 | GCCTCCCGTAGGAGT |
| | SEQ ID NO: 3198 |

In some embodiments, the present invention contemplates a method comprising filtering a set of 8 nucleotide base barcodes, and using the filtered barcodes for optimizing PCR and sequencing performance. In one embodiment, the filtering comprises selecting a barcode comprising a GC content of between approximately 40-60%. In one embodiment, the filtering comprises selecting a barcode lacking consecutive triple repeats of the same base (i.e., for example, AAA, TTT, GGG, CCC). In one embodiment, the filtering comprises selecting a barcode lacking perfect self-complementarity or complementarity between the 8-base barcode and the primer. Decoding was performed using a Python translation of an existing C implementation of Hamming codes. R H Morelos-Zaragoza, The Art of Error-Correcting Coding. (John Wiley & Sons, Hoboken, N.J., 2006); and Example II.

[0111] A. Barcode Validation

[0112] Utility of some embodiments of the present invention may be illustrated by determining the bacterial composition of 286 environmental samples by PCR amplifying, sequencing, and analyzing 681,688 16S rRNA gene sequences from a single sequencing run of the Genome Sequencer FLX (454 Life Sciences, Branford, Conn.). In one particular embodiment, 286 of the 1544 candidate codewords were used to synthesize barcoded PCR primers to use in PCR reactions amplifying a region (27F-338R) of the 16S rRNA gene that were previously determined to be a suitable region of the 16S rRNA to use for phylogenetic analysis from pyrosequencing reads. Wu et al., “Quantitative multiplexing analysis of PCR-amplified ribosomal RNA genes by hierarchical oligonucleotide primer extension reaction” Nucleic Acids Res. 35(11):e82 (2007).

[0113] To test these barcodes a set of 1,544 barcodes from the 2,048 possible combinations was chosen based on a nucleotide-encoding scheme that provides the largest number of valid “candidate” barcodes, and then those results were filtered based on optimal PCR and sequencing performance criteria. 286 of the 1,544 candidate barcodes were incorporated into PCR primers that were then used to amplify a region of the bacterial 16S rRNA gene in 286 separate environmental samples. Purified PCR products from each of the 286 samples were then quantified and added to a master DNA pool in equimolar ratios prior to pyrosequencing. Each of the resulting 437,544 sequences was assigned to a sample based on its barcode, aligned based on operational taxonomic units (OTUs) at 96% identity, assembled into a phylogenetic tree and clustered based on similarities in bacterial phylogenetic diversity. The results of this clustering correlated perfectly with sample type—all lung samples clustered together, as did all North American river samples, two African river samples, the microbial mat sample, air samples and hot spring samples. See, FIGS. 2 and 3. These results demonstrate that the tagged barcoding system allows phylogenetic analysis of microbial communities from hundreds of samples in a single sequencing run.

[0114] For each sample, the 16S rRNA gene was amplified using the composite forward primer

(SEQ ID NO: 3199)
5′-GCCTTGCCAGCCCGCTCAGTCAGAGTTTGATCCTGGCTCAG-3′:

the underlined sequence is 454 Life Sciences® primer B, and the sequence in italics is the broadly conserved bacterial primer 27F. A two-base linker sequence (‘TC’) that was not observed in >250,000 aligned 16S rRNA sequences was inserted between the 454 Life Sciences® primer B and 27F to help mitigate any effect the composite primer might have on PCR efficiency. The reverse primer was 5′-GCCTCCCTCGCGCCATCAGNNNNNNNN-CATGCTGCCTCCCGTAGGAGT-3′ (SEQ ID NO: 3200): the underlined sequence is 454 Life Sciences® primer A, and the sequence in italics is the broad range bacterial primer 338R. NNNNNNNN designates the unique eight-base barcode used to tag each PCR product, with ‘CA’ inserted as a linker between the barcode and rRNA primer. Total DNA was extracted from samples of a human lung, river water, a Guerrero Negro microbial mat, particles filtered from air, and hot spring water using a modified bead-beating solvent extraction and amplifed by PCR. Dojka et al., Appl Environ Microbiol 64 (10), 3869 (1998).

[0115] Briefly, PCR reaction conditions were as follows: 8 μl 2.5X HotMaster PCR Mix (Eppendorf), 0.3 μM each primer, and 10-100 ng template DNA in a total reaction volume of 20 μl. PCR was performed with an Eppendorf Mastercycler: 2 min at 95° C., followed by 30 cycles of 20 s at 95° C. (denaturing), 20 s at 52° C. (annealing) and 60 s at 65° C. (elongation). Four independent PCR reactions were performed for each sample, along with a no template (water) negative control. For each of 286 samples, the four replicate PCR reactions were combined, purified with Ampure magnetic purification beads (Agencourt), quantified with the Quant-iT PicoGreen dsDNA Assay Kit (Invitrogen) and a fluorospectrometer (Nanodrop ND3300), and combined in equimolar ratios to create a master DNA pool with a final concentration of 21.5 ng/μl, which was sent for pyrosequencing with primer A at 454 Life Sciences (Branford, Conn). Margulies et al., Nature 437(7057):376 (2005); Sogin et al., Proc Natl Acad Sci USA 103(32): 12115 (2006). After removal of low-quality sequences and trimming of primer sequences, 437,544 sequences remained, each representing between ˜240-280 bases of 16S rRNA sequence. The quality determination of each sequencing read was based on criteria previously described. Huse et al., Genome Biol 8:R143 (2007). See, Example III.

[0116] Each remaining sequence was assigned to a sample based on the barcodes by:
[0117] i) picking Operational Taxonomic Units (OTUs) at 96% identity;
[0118] ii) aligning one sequence representing each of the 25,351 OTUs with NAST. DeSantis et al., Nucleic Acids Res 34(Web Server Issue), W394 (2006). In comparison, a recent study of 202 globally diverse environments identified only 21,752 OTUs at the 97% level. Lozupone et al., Proc Natl Acad Sci USA 104(27):11436 (2007).
[0119] iii) building a “relaxed neighborjoining” tree with clearcut. Sheneman et al., Bioinformatics 22(22):2823 (2006)., and
[0120] iv) clustering the samples based on their similarities in bacterial phylogenetic diversity with UniFrac Lozupone et al., BMC Bioinformatics 7:371 (2006); and Lozupone et al., Appl Environ Microbiol 71(12):8228 (2005).

[0121] The clustering correlated perfectly with sample types wherein; i) all lung samples clustered together; ii) all North American river samples clustered together; iii) all microbial mat samples clustered together; iv) all air samples clustered together; v) all hot spring samples clustered together; and both African river water samples clustered together. See, FIG. 2.

[0122] The clustering was further analyzed to identify distributions of different divisions of bacteria in each of in each of the major sample classes. See, FIG. 3. The samples differ from one another, for example, the cystic fibrosis lung samples are dominated by Firmicutes and gamma-Proteobacteria (mostly Pseudosmona), whereas the Guerrero Negro microbial mat is dominated by Bacteroidetes, Proteobacteria, and Chloroflexi. The results indicate that the pyrosequencing reads provide data comparable to that obtained by traditional approaches.

[0123] Nineteen DNA samples were analyzed in triplicate with three independent barcode primers, and in each case the replicate samples clustered together in the UniFrac analysis. This suggests that these barcoded primers amplified equivalently in PCR. 1345 sequences (0.3%) had decoding errors, of which 1241 (92.2%) could be corrected to valid barcodes.

[0124] These results directly demonstrated that a tagged barcoding strategy can be used to obtain sequences ranging from approximately the hundreds to approximately the tens of thousands of samples in a single sequencing run. For example, nearly the total number of 16S rRNAs determined to date by Sanger sequencing can be sequenced in a single run using the compositions and methods disclosed herein. Subsequently, a phylogenetic analyses of microbial communities may be perform using the pyrosequencing data.

### Experimental

[0125] The foregoing discussion of the invention has been presented for purposes of illustration and description. The foregoing is not intended to limit the invention to the form or forms disclosed herein. Although the description of the invention has included description of one or more embodiments and certain variations and modifications, other variations and modifications are within the scope of the invention, e.g., as may be within the skill and knowledge of those in the art, after understanding the present disclosure. It is intended to obtain rights which include alternative embodiments to the extent permitted, including alternate, interchangeable and/or equivalent structures, functions, ranges or steps to those claimed, whether or not such alternate, interchangeable and/or equivalent structures, functions, ranges or steps are disclosed herein, and without intending to publicly dedicate any patentable subject matter.

### Example I

### Generation of Error-Correcting Nucleotide Barcodes and Primers

[0126] For each sample, a 16S rRNA gene was amplified using a composite forward primer

(SEQ ID NO: 3199)
5′-GCCTTGCCAGCCCGCTCAGTC [symbol] [symbol] [symbol] -3′

wherein the underlined sequence is 454 Life Sciences® primer B, and the bold sequence is the broadly conserved bacterial primer 27F.

[0127] Next, a two-base linker sequence (‘TC’) was inserted that was not observed in >250,000 aligned 16S rRNA sequences between the 454 primer B and 27F to help mitigate any effect the composite primer might have on PCR efficiency.

[0128] The reverse primer was 5′-GCCTCCCTCGCGCCATCAGNNNNNNNNCA- [symbol] [symbol] [symbol] -3′ (SEQ ID NO: 3200) wherein: i) the underlined sequence is 454 Life Sciences' primer A; ii) the bold sequence is the broad-range bacterial primer 338R; iii) the sequence NNNNNNNN designates the unique eight-base barcode used to tag each PCR product; and iv) ‘CA’ inserted as a linker between the barcode and rRNA primer.

[0129] The first 286 barcodes identified in Table 1 were used in the collection of data presented herein.

### Example II

### Barcode Identification Decoding Software

[0130] This example presents exemplary software that enables Hamming coding/decoding for pyrosequencing reads and the associated unit tests. This particular program is a command-line application where command-line access depends on the operating system, for example:

[0131] Macintosh/Apple OS: Utilities/Terminal:

[0132] Microsoft Windows: Start/Run then enter “cmd.exe” in the dialog box:

[0133] Linux: Terminal or Shell.

A Python and Numpy packages, available from python.org and numpy.scipy.org, can be downloaded and installed in order to run this software using the Python and the Numpy extension module.

### Example III

### Representative PCR Conditions

[0134] PCR reaction conditions were as follows: 8 μl 2.5X HotMaster PCR Mix (Eppendorf), 0.3μM each primer, and 10-100 ng template DNA in a total reaction volume of 20 μl. PCR used an Eppendorf Mastercycler: 120 s at 95° C., followed by 30 cycles of 20 s at 95° C. (denaturing), 20 s at 52° C. (annealing) and 60 s at 65° C. (elongation).

### Example IV

### Processing 454 Reads

[0135] Sequences were processed as previously described. Huse et al., Genome Biol 8(7):R143 (2007). In general, the basic steps included, but were not limited to:
[0136] 1. The read length distribution was examined, and the major peak was identified. Sequences shorter than 237 nt or longer than 283 nt were dropped which were approximately +/−2 standard deviations from the mean of the major peak. This step was performed manually, by inspection of the histogram.
[0137] 2. Dropped reads with an average quality score less than 25.
[0138] 3. Dropped reads that contained any ambiguous characters.
[0139] 4. Split sequence read: first 8 nt provide the barcode (“prefix”). The remainder of the sequence (“suffix”) is used for downstream analyses.
[0140] 5. Dropped sequences where the suffix does not start with the linker and primer sequence CATGCTGCCTCCCGTAGGAGT.
[0141] 6. Checked whether the barcode is present in the list of valid barcodes:
   [0142] a. If valid, remap to original sample id, assign unique sequence id to the read.
   [0143] b. If not, try to correct barcode using the Hamming decoder software in accordance with Example II.
      [0144] i. If corrected, remap to original sample id, assign unique sequence id to the read, and record the position and type of the error.
      [0145] ii. If not corrected, drop sequence.

### Example V

### OTU Picking Algorithm

[0146] OTUs were chosen using the following algorithm:
[0147] 1. Identify similar sequences using megablast₂. Parameters: E-value 1e-8, minimum coverage 99%, minimum pairwise identity 96%.
[0148] 2. Find sets of sequences that are connected to one another using BLAST hits at this level.
[0149] 3. Choose OTUs as follows:
   [0150] a. Connected components are candidate OTUs.
   [0151] b. The candidate OTU is considered valid if the average density of connections is above 70% (i.e. if 70% of the possible pairwise connections between sequences in the set exist). If the density is lower than this, split up connected component by picking a connected subgraph where the density is above threshold, until no sequences remain in the connected component.
[0152] 4. A representative sequence was chosen from each OTU by selecting the sequence with the largest number of hits to other sequences in the OTU. Ties were broken by choosing one of the longest sequences within the OTU at random.

### Example VI

### NAST Alignment and Lane Mask

[0153] 1. The representative set of sequences was aligned using NAST₃ with the following parameters:
   [0154] a. Minimum alignment length of 200, and 70% sequence identity.
   [0155] b. The template used was the “core_set_aligned.fasta.imputed” (i.e., for example, as posted Aug. 11, 2007 on greengenes.lbl.gov/Download/ Sequence_Data/Fasta_data_files/.
[0156] 2. The file PH_lanemask, as posted Jul. 18, 2007 greengenes.lbl.gov/Download/Sequence_Data/lanemask_in_{—}1s_and_{—}0s, was used to screen out hypervariable regions of the sequence.

### Example VII

### Tree Building and UniFrac Clustering

[0157] 1. A relaxed neighbor-joining tree was built using clearcut₄, using the Kimura correction but otherwise with default comparisons.
[0158] 2. Unweighted UniFrac was run using the resulting tree and the counts of each sequence in each environment. Lozupone et al., Appl Environ Microbiol 71(12): 8228 (2005); and Lozupone et al., BMC Bioinformatics 7:371 (2006).

### Example VIII

### Taxonomy Assignment

[0159] Taxonomy was assigned using the best BLAST hit against Greengenes₈, using an E value cutoff of 1e-10, and the Hugenholtz taxonomy. Altschul et al., J Mol Biol 215:403 (1990); and DeSantis et al., Appl Environ Microbiol 72:5069 (2006).

What is claimed is:

1. A pyrosequencing compatible primer comprising a first region containing a unique error-detecting/correcting hamming barcode.

2. The pyrosequencing compatible primer of claim 1, wherein the primer further comprises a second region complementary to a bacterial 16S rRNA gene.

3. A method of assigning sequence data to individual samples from a mixture of samples, comprising:
a) providing:
i) a pyrosequencing compatible primer comprising a first region containing a unique error-detecting/correcting barcode and a second region complementary to a target nucleic acid molecule, and
ii) a target nucleic acid molecule,
b) amplifying said target nucleic acid molecule with said primer,
c) pooling a plurality of said amplification product, and
d) pyrosequencing said pooled amplification products to determine their respective nucleotide sequences.

4. The method of claim 3, wherein said plurality of amplification products are pooled in equimolar ratios.

5. The method of claim 3, wherein said unique error-detecting/correcting barcode is a Hamming code.

6. The method of claim 3, wherein said target nucleic acid molecule comprises a portion of the 16S rRNA gene.

7. The method of claim 3, further comprising identifying amplification products with unique barcode sequence errors.

8. The method of claim 3, further comprising correcting the unique barcode sequence of amplification products containing correctable unique barcode sequence errors.

9. The method of claim 3, further comprising discarding the nucleotide sequence of amplification products containing non-correctable unique barcode sequence errors.

10. The method of claim 3, further comprising step e) aligning the nucleotide sequences of said amplification products to generate a phylogenetic tree.

11. A method comprising:
a) providing:
i) a plurality of samples comprising nucleic acid sequences;
ii) a plurality of primers error correcting or error-detecting sequence tags wherein said primers are at least partially complementary to said nucleic acid sequences:
iii) a parallel sequencing technique capable of simultaneously characterizing said nucleic acid sequences from said plurality of samples;
b) amplifying said plurality of nucleic acid samples using said plurality of primers; and
c) analyzing said sequence tags of said amplified nucleic acids.

12. The method of claim 11, wherein said sequence tag identifies a sample assignment thereby identifying one of said samples from which said nucleic acid was derived.

13. The method of claim 12, wherein said sequence tag identifies the presence of an error in said nucleic acid, thereby establishing a probability that said sample assignment is incorrect.

14. The method of claim 12, wherein said sequence tag identifies the absence of any error in said nucleic acid, thereby establishing a probability that said sample assignment is correct.

15. The method of claim 11, wherein said sequence technique comprises pyrosequencing.

The application's sequence listing, which the Patent Office published only in electronic form, follows.

SEQUENCE LISTING (3264 sequences)

SEQ ID NO: 1 - DNA, 8 bp, Artificial sequence
  Synthetic
aaccaacc

SEQ ID NO: 2 - DNA, 48 bp, Artificial sequence
  Synthetic
gcctccctcgcgccatcagaaccaacccatgctgcctcccgtaggagt

SEQ ID NO: 3 - DNA, 8 bp, Artificial sequence
  Synthetic
aaccaagg

SEQ ID NO: 4 - DNA, 48 bp, Artificial sequence
  Synthetic
gcctccctcgcgccatcagaaccaaggcatgctgcctcccgtaggagt

SEQ ID NO: 5 - DNA, 8 bp, Artificial sequence
  Synthetic
aaccatcg

SEQ ID NO: 6 - DNA, 48 bp, Artificial sequence
  Synthetic
gcctccctcgcgccatcagaaccatcgcatgctgcctcccgtaggagt

SEQ ID NO: 7 - DNA, 8 bp, Artificial sequence
  Synthetic
aaccatgc

SEQ ID NO: 8 - DNA, 48 bp, Artificial sequence
  Synthetic
gcctccctcgcgccatcagaaccatgccatgctgcctcccgtaggagt

SEQ ID NO: 9 - DNA, 8 bp, Artificial sequence
  Synthetic
aaccgcat

SEQ ID NO: 10 - DNA, 48 bp, Artificial sequence
  Synthetic
gcctccctcgcgccatcagaaccgcatcatgctgcctcccgtaggagt

SEQ ID NO: 11 - DNA, 8 bp, Artificial sequence
  Synthetic
aaccgcta

SEQ ID NO: 12 - DNA, 48 bp, Artificial sequence
  Synthetic
gcctccctcgcgccatcagaaccgctacatgctgcctcccgtaggagt

SEQ ID NO: 13 - DNA, 8 bp, Artificial sequence
  Synthetic
aaccggaa

SEQ ID NO: 14 - DNA, 48 bp, Artificial sequence
  Synthetic
gcctccctcgcgccatcagaaccggaacatgctgcctcccgtaggagt

SEQ ID NO: 15 - DNA, 8 bp, Artificial sequence
  Synthetic
aaccggtt

SEQ ID NO: 16 - DNA, 48 bp, Artificial sequence
  Synthetic
gcctccctcgcgccatcagaaccggttcatgctgcctcccgtaggagt

SEQ ID NO: 17 - DNA, 8 bp, Artificial sequence
  Synthetic
aacctacg

SEQ ID NO: 18 - DNA, 48 bp, Artificial sequence
  Synthetic
gcctccctcgcgccatcagaacctacgcatgctgcctcccgtaggagt

SEQ ID NO: 19 - DNA, 8 bp, Artificial sequence
  Synthetic
aacctagc

SEQ ID NO: 20 - DNA, 48 bp, Artificial sequence
  Synthetic
gcctccctcgcgccatcagaacctagccatgctgcctcccgtaggagt

SEQ ID NO: 21 - DNA, 8 bp, Artificial sequence
  Synthetic
aaccttcc

SEQ ID NO: 22 - DNA, 48 bp, Artificial sequence
  Synthetic
gcctccctcgcgccatcagaaccttcccatgctgcctcccgtaggagt

SEQ ID NO: 23 - DNA, 8 bp, Artificial sequence
  Synthetic
aaccttgg

SEQ ID NO: 24 - DNA, 48 bp, Artificial sequence
  Synthetic
gcctccctcgcgccatcagaaccttggcatgctgcctcccgtaggagt

SEQ ID NO: 25 - DNA, 8 bp, Artificial sequence
  Synthetic
aacgaacg

SEQ ID NO: 26 - DNA, 48 bp, Artificial sequence
  Synthetic
gcctccctcgcgccatcagaacgaacgcatgctgcctcccgtaggagt

SEQ ID NO: 27 - DNA, 8 bp, Artificial sequence
  Synthetic
aacgaagc

SEQ ID NO: 28 - DNA, 48 bp, Artificial sequence
  Synthetic
gcctccctcgcgccatcagaacgaagccatgctgcctcccgtaggagt

SEQ ID NO: 29 - DNA, 8 bp, Artificial sequence
  Synthetic
aacgatcc

SEQ ID NO: 30 - DNA, 48 bp, Artificial sequence
  Synthetic
gcctccctcgcgccatcagaacgatcccatgctgcctcccgtaggagt

SEQ ID NO: 31 - DNA, 8 bp, Artificial sequence
  Synthetic
aacgatgg

SEQ ID NO: 32 - DNA, 48 bp, Artificial sequence
  Synthetic
gcctccctcgcgccatcagaacgatggcatgctgcctcccgtaggagt

SEQ ID NO: 33 - DNA, 8 bp, Artificial sequence
  Synthetic
aacgccat

SEQ ID NO: 34 - DNA, 48 bp, Artificial sequence
  Synthetic
gcctccctcgcgccatcagaacgccatcatgctgcctcccgtaggagt

SEQ ID NO: 35 - DNA, 8 bp, Artificial sequence
  Synthetic
aacgccta

SEQ ID NO: 36 - DNA, 48 bp, Artificial sequence
  Synthetic
gcctccctcgcgccatcagaacgcctacatgctgcctcccgtaggagt

SEQ ID NO: 37 - DNA, 8 bp, Artificial sequence
  Synthetic
aacgcgaa

SEQ ID NO: 38 - DNA, 48 bp, Artificial sequence
  Synthetic
gcctccctcgcgccatcagaacgcgaacatgctgcctcccgtaggagt

SEQ ID NO: 39 - DNA, 8 bp, Artificial sequence
  Synthetic
aacgcgtt

SEQ ID NO: 40 - DNA, 48 bp, Artificial sequence
  Synthetic
gcctccctcgcgccatcagaacgcgttcatgctgcctcccgtaggagt

SEQ ID NO: 41 - DNA, 8 bp, Artificial sequence
  Synthetic
aacggcaa

SEQ ID NO: 42 - DNA, 48 bp, Artificial sequence
  Synthetic
gcctccctcgcgccatcagaacggcaacatgctgcctcccgtaggagt

SEQ ID NO: 43 - DNA, 8 bp, Artificial sequence
  Synthetic
aacggctt

SEQ ID NO: 44 - DNA, 48 bp, Artificial sequence
  Synthetic
gcctccctcgcgccatcagaacggcttcatgctgcctcccgtaggagt

SEQ ID NO: 45 - DNA, 8 bp, Artificial sequence
  Synthetic
aacgtacc

SEQ ID NO: 46 - DNA, 48 bp, Artificial sequence
  Synthetic
gcctccctcgcgccatcagaacgtacccatgctgcctcccgtaggagt

SEQ ID NO: 47 - DNA, 8 bp, Artificial sequence
  Synthetic
aacgtagg

SEQ ID NO: 48 - DNA, 48 bp, Artificial sequence
  Synthetic
gcctccctcgcgccatcagaacgtaggcatgctgcctcccgtaggagt

SEQ ID NO: 49 - DNA, 8 bp, Artificial sequence
  Synthetic
aacgttcg

SEQ ID NO: 50 - DNA, 48 bp, Artificial sequence
  Synthetic
gcctccctcgcgccatcagaacgttcgcatgctgcctcccgtaggagt

SEQ ID NO: 51 - DNA, 8 bp, Artificial sequence
  Synthetic
aacgttgc

SEQ ID NO: 52 - DNA, 48 bp, Artificial sequence
  Synthetic
gcctccctcgcgccatcagaacgttgccatgctgcctcccgtaggagt

SEQ ID NO: 53 - DNA, 8 bp, Artificial sequence
  Synthetic
aagcaacg

SEQ ID NO: 54 - DNA, 48 bp, Artificial sequence
  Synthetic
gcctccctcgcgccatcagaagcaacgcatgctgcctcccgtaggagt

SEQ ID NO: 55 - DNA, 8 bp, Artificial sequence
  Synthetic
aagcaagc

SEQ ID NO: 56 - DNA, 48 bp, Artificial sequence
  Synthetic
gcctccctcgcgccatcagaagcaagccatgctgcctcccgtaggagt

SEQ ID NO: 57 - DNA, 8 bp, Artificial sequence
  Synthetic
aagcatcc

SEQ ID NO: 58 - DNA, 48 bp, Artificial sequence
  Synthetic
gcctccctcgcgccatcagaagcatcccatgctgcctcccgtaggagt

SEQ ID NO: 59 - DNA, 8 bp, Artificial sequence
  Synthetic
aagcatgg

SEQ ID NO: 60 - DNA, 48 bp, Artificial sequence
  Synthetic
gcctccctcgcgccatcagaagcatggcatgctgcctcccgtaggagt

SEQ ID NO: 61 - DNA, 8 bp, Artificial sequence
  Synthetic
aagccgaa

SEQ ID NO: 62 - DNA, 48 bp, Artificial sequence
  Synthetic
gcctccctcgcgccatcagaagccgaacatgctgcctcccgtaggagt

SEQ ID NO: 63 - DNA, 8 bp, Artificial sequence
  Synthetic
aagccgtt

SEQ ID NO: 64 - DNA, 48 bp, Artificial sequence
  Synthetic
gcctccctcgcgccatcagaagccgttcatgctgcctcccgtaggagt

SEQ ID NO: 65 - DNA, 8 bp, Artificial sequence
  Synthetic
aagcgcaa

SEQ ID NO: 66 - DNA, 48 bp, Artificial sequence
  Synthetic
gcctccctcgcgccatcagaagcgcaacatgctgcctcccgtaggagt

SEQ ID NO: 67 - DNA, 8 bp, Artificial sequence
  Synthetic
aagcgctt

SEQ ID NO: 68 - DNA, 48 bp, Artificial sequence
  Synthetic
gcctccctcgcgccatcagaagcgcttcatgctgcctcccgtaggagt

SEQ ID NO: 69 - DNA, 8 bp, Artificial sequence
  Synthetic
aagcggat

SEQ ID NO: 70 - DNA, 48 bp, Artificial sequence
  Synthetic
gcctccctcgcgccatcagaagcggatcatgctgcctcccgtaggagt

SEQ ID NO: 71 - DNA, 8 bp, Artificial sequence
  Synthetic
aagcggta

SEQ ID NO: 72 - DNA, 48 bp, Artificial sequence
  Synthetic
gcctccctcgcgccatcagaagcggtacatgctgcctcccgtaggagt

SEQ ID NO: 73 - DNA, 8 bp, Artificial sequence
  Synthetic
aagctacc

SEQ ID NO: 74 - DNA, 48 bp, Artificial sequence
  Synthetic
gcctccctcgcgccatcagaagctacccatgctgcctcccgtaggagt

SEQ ID NO: 75 - DNA, 8 bp, Artificial sequence
  Synthetic
aagctagg

SEQ ID NO: 76 - DNA, 48 bp, Artificial sequence
  Synthetic
gcctccctcgcgccatcagaagctaggcatgctgcctcccgtaggagt

SEQ ID NO: 77 - DNA, 8 bp, Artificial sequence
  Synthetic
aagcttcg

SEQ ID NO: 78 - DNA, 48 bp, Artificial sequence
  Synthetic
gcctccctcgcgccatcagaagcttcgcatgctgcctcccgtaggagt

SEQ ID NO: 79 - DNA, 8 bp, Artificial sequence
  Synthetic
aagcttgc

SEQ ID NO: 80 - DNA, 48 bp, Artificial sequence
  Synthetic
gcctccctcgcgccatcagaagcttgccatgctgcctcccgtaggagt

SEQ ID NO: 81 - DNA, 8 bp, Artificial sequence
  Synthetic
aaggaacc

SEQ ID NO: 82 - DNA, 48 bp, Artificial sequence
  Synthetic
gcctccctcgcgccatcagaaggaacccatgctgcctcccgtaggagt

SEQ ID NO: 83 - DNA, 8 bp, Artificial sequence
  Synthetic
aaggaagg

SEQ ID NO: 84 - DNA, 48 bp, Artificial sequence
  Synthetic
gcctccctcgcgccatcagaaggaaggcatgctgcctcccgtaggagt

SEQ ID NO: 85 - DNA, 8 bp, Artificial sequence
  Synthetic
aaggatcg

SEQ ID NO: 86 - DNA, 48 bp, Artificial sequence
  Synthetic
gcctccctcgcgccatcagaaggatcgcatgctgcctcccgtaggagt

SEQ ID NO: 87 - DNA, 8 bp, Artificial sequence
  Synthetic
aaggatgc

SEQ ID NO: 88 - DNA, 48 bp, Artificial sequence
  Synthetic
gcctccctcgcgccatcagaaggatgccatgctgcctcccgtaggagt

SEQ ID NO: 89 - DNA, 8 bp, Artificial sequence
  Synthetic
aaggccaa

SEQ ID NO: 90 - DNA, 48 bp, Artificial sequence
  Synthetic
gcctccctcgcgccatcagaaggccaacatgctgcctcccgtaggagt

SEQ ID NO: 91 - DNA, 8 bp, Artificial sequence
  Synthetic
aaggcctt

SEQ ID NO: 92 - DNA, 48 bp, Artificial sequence
  Synthetic
gcctccctcgcgccatcagaaggccttcatgctgcctcccgtaggagt

SEQ ID NO: 93 - DNA, 8 bp, Artificial sequence
  Synthetic
aaggcgat

SEQ ID NO: 94 - DNA, 48 bp, Artificial sequence
  Synthetic
gcctccctcgcgccatcagaaggcgatcatgctgcctcccgtaggagt

SEQ ID NO: 95 - DNA, 8 bp, Artificial sequence
  Synthetic
aaggcgta

SEQ ID NO: 96 - DNA, 48 bp, Artificial sequence
  Synthetic
gcctccctcgcgccatcagaaggcgtacatgctgcctcccgtaggagt

SEQ ID NO: 97 - DNA, 8 bp, Artificial sequence
  Synthetic
aaggtacg

SEQ ID NO: 98 - DNA, 48 bp, Artificial sequence
  Synthetic
gcctccctcgcgccatcagaaggtacgcatgctgcctcccgtaggagt

SEQ ID NO: 99 - DNA, 8 bp, Artificial sequence
  Synthetic
aaggtagc

SEQ ID NO: 100 - DNA, 48 bp, Artificial sequence
  Synthetic
gcctccctcgcgccatcagaaggtagccatgctgcctcccgtaggagt

SEQ ID NO: 101 - DNA, 8 bp, Artificial sequence
  Synthetic
aaggttcc

SEQ ID NO: 102 - DNA, 48 bp, Artificial sequence
  Synthetic
gcctccctcgcgccatcagaaggttcccatgctgcctcccgtaggagt

SEQ ID NO: 103 - DNA, 8 bp, Artificial sequence
  Synthetic
aaggttgg

SEQ ID NO: 104 - DNA, 48 bp, Artificial sequence
  Synthetic
gcctccctcgcgccatcagaaggttggcatgctgcctcccgtaggagt

SEQ ID NO: 105 - DNA, 8 bp, Artificial sequence
  Synthetic
aataccgc

SEQ ID NO: 106 - DNA, 48 bp, Artificial sequence
  Synthetic
gcctccctcgcgccatcagaataccgccatgctgcctcccgtaggagt

SEQ ID NO: 107 - DNA, 8 bp, Artificial sequence
  Synthetic
aatacgcc

SEQ ID NO: 108 - DNA, 48 bp, Artificial sequence
  Synthetic
gcctccctcgcgccatcagaatacgcccatgctgcctcccgtaggagt

SEQ ID NO: 109 - DNA, 8 bp, Artificial sequence
  Synthetic
aatagcgg

SEQ ID NO: 110 - DNA, 48 bp, Artificial sequence
  Synthetic
gcctccctcgcgccatcagaatagcggcatgctgcctcccgtaggagt

SEQ ID NO: 111 - DNA, 8 bp, Artificial sequence
  Synthetic
aataggcg

SEQ ID NO: 112 - DNA, 48 bp, Artificial sequence
  Synthetic
gcctccctcgcgccatcagaataggcgcatgctgcctcccgtaggagt

SEQ ID NO: 113 - DNA, 8 bp, Artificial sequence
  Synthetic
aattccgg

SEQ ID NO: 114 - DNA, 48 bp, Artificial sequence
  Synthetic
gcctccctcgcgccatcagaattccggcatgctgcctcccgtaggagt

SEQ ID NO: 115 - DNA, 8 bp, Artificial sequence
  Synthetic
aattcgcg

SEQ ID NO: 116 - DNA, 48 bp, Artificial sequence
  Synthetic
gcctccctcgcgccatcagaattcgcgcatgctgcctcccgtaggagt

SEQ ID NO: 117 - DNA, 8 bp, Artificial sequence
  Synthetic
aattcggc

SEQ ID NO: 118 - DNA, 48 bp, Artificial sequence
  Synthetic
gcctccctcgcgccatcagaattcggccatgctgcctcccgtaggagt

SEQ ID NO: 119 - DNA, 8 bp, Artificial sequence
  Synthetic
aattgccg

SEQ ID NO: 120 - DNA, 48 bp, Artificial sequence
  Synthetic
gcctccctcgcgccatcagaattgccgcatgctgcctcccgtaggagt

SEQ ID NO: 121 - DNA, 8 bp, Artificial sequence
  Synthetic
aattgcgc

SEQ ID NO: 122 - DNA, 48 bp, Artificial sequence
  Synthetic
gcctccctcgcgccatcagaattgcgccatgctgcctcccgtaggagt

SEQ ID NO: 123 - DNA, 8 bp, Artificial sequence
  Synthetic
aattggcc

SEQ ID NO: 124 - DNA, 48 bp, Artificial sequence
  Synthetic
gcctccctcgcgccatcagaattggcccatgctgcctcccgtaggagt

SEQ ID NO: 125 - DNA, 8 bp, Artificial sequence
  Synthetic
acacacac

SEQ ID NO: 126 - DNA, 48 bp, Artificial sequence
  Synthetic
gcctccctcgcgccatcagacacacaccatgctgcctcccgtaggagt

SEQ ID NO: 127 - DNA, 8 bp, Artificial sequence
  Synthetic
acacactg

SEQ ID NO: 128 - DNA, 48 bp, Artificial sequence
  Synthetic
gcctccctcgcgccatcagacacactgcatgctgcctcccgtaggagt

SEQ ID NO: 129 - DNA, 8 bp, Artificial sequence
  Synthetic
acacagag

SEQ ID NO: 130 - DNA, 48 bp, Artificial sequence
  Synthetic
gcctccctcgcgccatcagacacagagcatgctgcctcccgtaggagt

SEQ ID NO: 131 - DNA, 8 bp, Artificial sequence
  Synthetic
acacagtc

SEQ ID NO: 132 - DNA, 48 bp, Artificial sequence
  Synthetic
gcctccctcgcgccatcagacacagtccatgctgcctcccgtaggagt

SEQ ID NO: 133 - DNA, 8 bp, Artificial sequence
  Synthetic
acaccaca

SEQ ID NO: 134 - DNA, 48 bp, Artificial sequence
  Synthetic
gcctccctcgcgccatcagacaccacacatgctgcctcccgtaggagt

SEQ ID NO: 135 - DNA, 8 bp, Artificial sequence
  Synthetic
acaccagt

SEQ ID NO: 136 - DNA, 48 bp, Artificial sequence
  Synthetic
gcctccctcgcgccatcagacaccagtcatgctgcctcccgtaggagt

SEQ ID NO: 137 - DNA, 8 bp, Artificial sequence
  Synthetic
acacctct

SEQ ID NO: 138 - DNA, 48 bp, Artificial sequence
  Synthetic
gcctccctcgcgccatcagacacctctcatgctgcctcccgtaggagt

SEQ ID NO: 139 - DNA, 8 bp, Artificial sequence
  Synthetic
acacctga

SEQ ID NO: 140 - DNA, 48 bp, Artificial sequence
  Synthetic
gcctccctcgcgccatcagacacctgacatgctgcctcccgtaggagt

SEQ ID NO: 141 - DNA, 8 bp, Artificial sequence
  Synthetic
acacgact

SEQ ID NO: 142 - DNA, 48 bp, Artificial sequence
  Synthetic
gcctccctcgcgccatcagacacgactcatgctgcctcccgtaggagt

SEQ ID NO: 143 - DNA, 8 bp, Artificial sequence
  Synthetic
acacgaga

SEQ ID NO: 144 - DNA, 48 bp, Artificial sequence
  Synthetic
gcctccctcgcgccatcagacacgagacatgctgcctcccgtaggagt

SEQ ID NO: 145 - DNA, 8 bp, Artificial sequence
  Synthetic
acacgtca

SEQ ID NO: 146 - DNA, 48 bp, Artificial sequence
  Synthetic
gcctccctcgcgccatcagacacgtcacatgctgcctcccgtaggagt

SEQ ID NO: 147 - DNA, 8 bp, Artificial sequence
  Synthetic
acacgtgt

SEQ ID NO: 148 - DNA, 48 bp, Artificial sequence
  Synthetic
gcctccctcgcgccatcagacacgtgtcatgctgcctcccgtaggagt

SEQ ID NO: 149 - DNA, 8 bp, Artificial sequence
  Synthetic
acactcag

SEQ ID NO: 150 - DNA, 48 bp, Artificial sequence
  Synthetic
gcctccctcgcgccatcagacactcagcatgctgcctcccgtaggagt

SEQ ID NO: 151 - DNA, 8 bp, Artificial sequence
  Synthetic
acactctc

SEQ ID NO: 152 - DNA, 48 bp, Artificial sequence
  Synthetic
gcctccctcgcgccatcagacactctccatgctgcctcccgtaggagt

SEQ ID NO: 153 - DNA, 8 bp, Artificial sequence
  Synthetic
acactgac

SEQ ID NO: 154 - DNA, 48 bp, Artificial sequence
  Synthetic
gcctccctcgcgccatcagacactgaccatgctgcctcccgtaggagt

SEQ ID NO: 155 - DNA, 8 bp, Artificial sequence
  Synthetic
acactgtg

SEQ ID NO: 156 - DNA, 48 bp, Artificial sequence
  Synthetic
gcctccctcgcgccatcagacactgtgcatgctgcctcccgtaggagt

SEQ ID NO: 157 - DNA, 8 bp, Artificial sequence
  Synthetic
acagacag

SEQ ID NO: 158 - DNA, 48 bp, Artificial sequence
  Synthetic
gcctccctcgcgccatcagacagacagcatgctgcctcccgtaggagt

SEQ ID NO: 159 - DNA, 8 bp, Artificial sequence
  Synthetic
acagactc

SEQ ID NO: 160 - DNA, 48 bp, Artificial sequence
  Synthetic
gcctccctcgcgccatcagacagactccatgctgcctcccgtaggagt

SEQ ID NO: 161 - DNA, 8 bp, Artificial sequence
  Synthetic
acagagac

SEQ ID NO: 162 - DNA, 48 bp, Artificial sequence
  Synthetic
gcctccctcgcgccatcagacagagaccatgctgcctcccgtaggagt

SEQ ID NO: 163 - DNA, 8 bp, Artificial sequence
  Synthetic
acagagtg

SEQ ID NO: 164 - DNA, 48 bp, Artificial sequence
  Synthetic
gcctccctcgcgccatcagacagagtgcatgctgcctcccgtaggagt

SEQ ID NO: 165 - DNA, 8 bp, Artificial sequence
  Synthetic
acagcact

SEQ ID NO: 166 - DNA, 48 bp, Artificial sequence
  Synthetic
gcctccctcgcgccatcagacagcactcatgctgcctcccgtaggagt

SEQ ID NO: 167 - DNA, 8 bp, Artificial sequence
  Synthetic
acagcaga

SEQ ID NO: 168 - DNA, 48 bp, Artificial sequence
  Synthetic
gcctccctcgcgccatcagacagcagacatgctgcctcccgtaggagt

SEQ ID NO: 169 - DNA, 8 bp, Artificial sequence
  Synthetic
acagctca

SEQ ID NO: 170 - DNA, 48 bp, Artificial sequence
  Synthetic
gcctccctcgcgccatcagacagctcacatgctgcctcccgtaggagt

SEQ ID NO: 171 - DNA, 8 bp, Artificial sequence
  Synthetic
acagctgt

SEQ ID NO: 172 - DNA, 48 bp, Artificial sequence
  Synthetic
gcctccctcgcgccatcagacagctgtcatgctgcctcccgtaggagt

SEQ ID NO: 173 - DNA, 8 bp, Artificial sequence
  Synthetic
acaggaca

SEQ ID NO: 174 - DNA, 48 bp, Artificial sequence
  Synthetic
gcctccctcgcgccatcagacaggacacatgctgcctcccgtaggagt

SEQ ID NO: 175 - DNA, 8 bp, Artificial sequence
  Synthetic
acaggagt

SEQ ID NO: 176 - DNA, 48 bp, Artificial sequence
  Synthetic
gcctccctcgcgccatcagacaggagtcatgctgcctcccgtaggagt

SEQ ID NO: 177 - DNA, 8 bp, Artificial sequence
  Synthetic
acaggtct

SEQ ID NO: 178 - DNA, 48 bp, Artificial sequence
  Synthetic
gcctccctcgcgccatcagacaggtctcatgctgcctcccgtaggagt

SEQ ID NO: 179 - DNA, 8 bp, Artificial sequence
  Synthetic
acaggtga

SEQ ID NO: 180 - DNA, 48 bp, Artificial sequence
  Synthetic
gcctccctcgcgccatcagacaggtgacatgctgcctcccgtaggagt

SEQ ID NO: 181 - DNA, 8 bp, Artificial sequence
  Synthetic
acagtcac

SEQ ID NO: 182 - DNA, 48 bp, Artificial sequence
  Synthetic
gcctccctcgcgccatcagacagtcaccatgctgcctcccgtaggagt

SEQ ID NO: 183 - DNA, 8 bp, Artificial sequence
  Synthetic
acagtctg

SEQ ID NO: 184 - DNA, 48 bp, Artificial sequence
  Synthetic
gcctccctcgcgccatcagacagtctgcatgctgcctcccgtaggagt

SEQ ID NO: 185 - DNA, 8 bp, Artificial sequence
  Synthetic
acagtgag

SEQ ID NO: 186 - DNA, 48 bp, Artificial sequence
  Synthetic
gcctccctcgcgccatcagacagtgagcatgctgcctcccgtaggagt

SEQ ID NO: 187 - DNA, 8 bp, Artificial sequence
  Synthetic
acagtgtc

SEQ ID NO: 188 - DNA, 48 bp, Artificial sequence
  Synthetic
gcctccctcgcgccatcagacagtgtccatgctgcctcccgtaggagt

SEQ ID NO: 189 - DNA, 8 bp, Artificial sequence
  Synthetic
accaacca

SEQ ID NO: 190 - DNA, 48 bp, Artificial sequence
  Synthetic
gcctccctcgcgccatcagaccaaccacatgctgcctcccgtaggagt

SEQ ID NO: 191 - DNA, 8 bp, Artificial sequence
  Synthetic
accaacgt

SEQ ID NO: 192 - DNA, 48 bp, Artificial sequence
  Synthetic
gcctccctcgcgccatcagaccaacgtcatgctgcctcccgtaggagt

SEQ ID NO: 193 - DNA, 8 bp, Artificial sequence
  Synthetic
accaagct

SEQ ID NO: 194 - DNA, 48 bp, Artificial sequence
  Synthetic
gcctccctcgcgccatcagaccaagctcatgctgcctcccgtaggagt

SEQ ID NO: 195 - DNA, 8 bp, Artificial sequence
  Synthetic
accaagga

SEQ ID NO: 196 - DNA, 48 bp, Artificial sequence
  Synthetic
gcctccctcgcgccatcagaccaaggacatgctgcctcccgtaggagt

SEQ ID NO: 197 - DNA, 8 bp, Artificial sequence
  Synthetic
accacaac

SEQ ID NO: 198 - DNA, 48 bp, Artificial sequence
  Synthetic
gcctccctcgcgccatcagaccacaaccatgctgcctcccgtaggagt

SEQ ID NO: 199 - DNA, 8 bp, Artificial sequence
  Synthetic
accacatg

SEQ ID NO: 200 - DNA, 48 bp, Artificial sequence
  Synthetic
gcctccctcgcgccatcagaccacatgcatgctgcctcccgtaggagt

SEQ ID NO: 201 - DNA, 8 bp, Artificial sequence
  Synthetic
accactag

SEQ ID NO: 202 - DNA, 48 bp, Artificial sequence
  Synthetic
gcctccctcgcgccatcagaccactagcatgctgcctcccgtaggagt

SEQ ID NO: 203 - DNA, 8 bp, Artificial sequence
  Synthetic
accacttc

SEQ ID NO: 204 - DNA, 48 bp, Artificial sequence
  Synthetic
gcctccctcgcgccatcagaccacttccatgctgcctcccgtaggagt

SEQ ID NO: 205 - DNA, 8 bp, Artificial sequence
  Synthetic
accagaag

SEQ ID NO: 206 - DNA, 48 bp, Artificial sequence
  Synthetic
gcctccctcgcgccatcagaccagaagcatgctgcctcccgtaggagt

SEQ ID NO: 207 - DNA, 8 bp, Artificial sequence
  Synthetic
accagatc

SEQ ID NO: 208 - DNA, 48 bp, Artificial sequence
  Synthetic
gcctccctcgcgccatcagaccagatccatgctgcctcccgtaggagt

SEQ ID NO: 209 - DNA, 8 bp, Artificial sequence
  Synthetic
accagtac

SEQ ID NO: 210 - DNA, 48 bp, Artificial sequence
  Synthetic
gcctccctcgcgccatcagaccagtaccatgctgcctcccgtaggagt

SEQ ID NO: 211 - DNA, 8 bp, Artificial sequence
  Synthetic
accagttg

SEQ ID NO: 212 - DNA, 48 bp, Artificial sequence
  Synthetic
gcctccctcgcgccatcagaccagttgcatgctgcctcccgtaggagt

SEQ ID NO: 213 - DNA, 8 bp, Artificial sequence
  Synthetic
accatcct

SEQ ID NO: 214 - DNA, 48 bp, Artificial sequence
  Synthetic
gcctccctcgcgccatcagaccatcctcatgctgcctcccgtaggagt

SEQ ID NO: 215 - DNA, 8 bp, Artificial sequence
  Synthetic
accatcga

SEQ ID NO: 216 - DNA, 48 bp, Artificial sequence
  Synthetic
gcctccctcgcgccatcagaccatcgacatgctgcctcccgtaggagt

SEQ ID NO: 217 - DNA, 8 bp, Artificial sequence
  Synthetic
accatgca

SEQ ID NO: 218 - DNA, 48 bp, Artificial sequence
  Synthetic
gcctccctcgcgccatcagaccatgcacatgctgcctcccgtaggagt

SEQ ID NO: 219 - DNA, 8 bp, Artificial sequence
  Synthetic
accatggt

SEQ ID NO: 220 - DNA, 48 bp, Artificial sequence
  Synthetic
gcctccctcgcgccatcagaccatggtcatgctgcctcccgtaggagt

SEQ ID NO: 221 - DNA, 8 bp, Artificial sequence
  Synthetic
acctacct

SEQ ID NO: 222 - DNA, 48 bp, Artificial sequence
  Synthetic
gcctccctcgcgccatcagacctacctcatgctgcctcccgtaggagt

SEQ ID NO: 223 - DNA, 8 bp, Artificial sequence
  Synthetic
acctacga

SEQ ID NO: 224 - DNA, 48 bp, Artificial sequence
  Synthetic
gcctccctcgcgccatcagacctacgacatgctgcctcccgtaggagt

SEQ ID NO: 225 - DNA, 8 bp, Artificial sequence
  Synthetic
acctagca

SEQ ID NO: 226 - DNA, 48 bp, Artificial sequence
  Synthetic
gcctccctcgcgccatcagacctagcacatgctgcctcccgtaggagt

SEQ ID NO: 227 - DNA, 8 bp, Artificial sequence
  Synthetic
acctaggt

SEQ ID NO: 228 - DNA, 48 bp, Artificial sequence
  Synthetic
gcctccctcgcgccatcagacctaggtcatgctgcctcccgtaggagt

SEQ ID NO: 229 - DNA, 8 bp, Artificial sequence
  Synthetic
acctcaag

SEQ ID NO: 230 - DNA, 48 bp, Artificial sequence
  Synthetic
gcctccctcgcgccatcagacctcaagcatgctgcctcccgtaggagt

SEQ ID NO: 231 - DNA, 8 bp, Artificial sequence
  Synthetic
acctcatc

SEQ ID NO: 232 - DNA, 48 bp, Artificial sequence
  Synthetic
gcctccctcgcgccatcagacctcatccatgctgcctcccgtaggagt

SEQ ID NO: 233 - DNA, 8 bp, Artificial sequence
  Synthetic
acctctac

SEQ ID NO: 234 - DNA, 48 bp, Artificial sequence
  Synthetic
gcctccctcgcgccatcagacctctaccatgctgcctcccgtaggagt

SEQ ID NO: 235 - DNA, 8 bp, Artificial sequence
  Synthetic
acctcttg

SEQ ID NO: 236 - DNA, 48 bp, Artificial sequence
  Synthetic
gcctccctcgcgccatcagacctcttgcatgctgcctcccgtaggagt

SEQ ID NO: 237 - DNA, 8 bp, Artificial sequence
  Synthetic
acctgaac

SEQ ID NO: 238 - DNA, 48 bp, Artificial sequence
  Synthetic
gcctccctcgcgccatcagacctgaaccatgctgcctcccgtaggagt

SEQ ID NO: 239 - DNA, 8 bp, Artificial sequence
  Synthetic
acctgatg

SEQ ID NO: 240 - DNA, 48 bp, Artificial sequence
  Synthetic
gcctccctcgcgccatcagacctgatgcatgctgcctcccgtaggagt

SEQ ID NO: 241 - DNA, 8 bp, Artificial sequence
  Synthetic
acctgtag

SEQ ID NO: 242 - DNA, 48 bp, Artificial sequence
  Synthetic
gcctccctcgcgccatcagacctgtagcatgctgcctcccgtaggagt

SEQ ID NO: 243 - DNA, 8 bp, Artificial sequence
  Synthetic
acctgttc

SEQ ID NO: 244 - DNA, 48 bp, Artificial sequence
  Synthetic
gcctccctcgcgccatcagacctgttccatgctgcctcccgtaggagt

SEQ ID NO: 245 - DNA, 7 bp, Artificial sequence
  Synthetic
ccttcca

SEQ ID NO: 246 - DNA, 48 bp, Artificial sequence
  Synthetic
gcctccctcgcgccatcagaccttccacatgctgcctcccgtaggagt

SEQ ID NO: 247 - DNA, 8 bp, Artificial sequence
  Synthetic
accttcgt

SEQ ID NO: 248 - DNA, 48 bp, Artificial sequence
  Synthetic
gcctccctcgcgccatcagaccttcgtcatgctgcctcccgtaggagt

SEQ ID NO: 249 - DNA, 8 bp, Artificial sequence
  Synthetic
accttgct

SEQ ID NO: 250 - DNA, 48 bp, Artificial sequence
  Synthetic
gcctccctcgcgccatcagaccttgctcatgctgcctcccgtaggagt

SEQ ID NO: 251 - DNA, 8 bp, Artificial sequence
  Synthetic
accttgga

SEQ ID NO: 252 - DNA, 48 bp, Artificial sequence
  Synthetic
gcctccctcgcgccatcagaccttggacatgctgcctcccgtaggagt

SEQ ID NO: 253 - DNA, 8 bp, Artificial sequence
  Synthetic
acgaacct

SEQ ID NO: 254 - DNA, 48 bp, Artificial sequence
  Synthetic
gcctccctcgcgccatcagacgaacctcatgctgcctcccgtaggagt

SEQ ID NO: 255 - DNA, 8 bp, Artificial sequence
  Synthetic
acgaacga

SEQ ID NO: 256 - DNA, 48 bp, Artificial sequence
  Synthetic
gcctccctcgcgccatcagacgaacgacatgctgcctcccgtaggagt

SEQ ID NO: 257 - DNA, 8 bp, Artificial sequence
  Synthetic
acgaagca

SEQ ID NO: 258 - DNA, 48 bp, Artificial sequence
  Synthetic
gcctccctcgcgccatcagacgaagcacatgctgcctcccgtaggagt

SEQ ID NO: 259 - DNA, 8 bp, Artificial sequence
  Synthetic
acgaaggt

SEQ ID NO: 260 - DNA, 48 bp, Artificial sequence
  Synthetic
gcctccctcgcgccatcagacgaaggtcatgctgcctcccgtaggagt

SEQ ID NO: 261 - DNA, 8 bp, Artificial sequence
  Synthetic
acgacaag

SEQ ID NO: 262 - DNA, 48 bp, Artificial sequence
  Synthetic
gcctccctcgcgccatcagacgacaagcatgctgcctcccgtaggagt

SEQ ID NO: 263 - DNA, 8 bp, Artificial sequence
  Synthetic
acgacatc

SEQ ID NO: 264 - DNA, 48 bp, Artificial sequence
  Synthetic
gcctccctcgcgccatcagacgacatccatgctgcctcccgtaggagt

SEQ ID NO: 265 - DNA, 8 bp, Artificial sequence
  Synthetic
acgactac

SEQ ID NO: 266 - DNA, 48 bp, Artificial sequence
  Synthetic
gcctccctcgcgccatcagacgactaccatgctgcctcccgtaggagt

SEQ ID NO: 267 - DNA, 8 bp, Artificial sequence
  Synthetic
acgacttg

SEQ ID NO: 268 - DNA, 48 bp, Artificial sequence
  Synthetic
gcctccctcgcgccatcagacgacttgcatgctgcctcccgtaggagt

SEQ ID NO: 269 - DNA, 8 bp, Artificial sequence
  Synthetic
acgagaac

SEQ ID NO: 270 - DNA, 48 bp, Artificial sequence
  Synthetic
gcctccctcgcgccatcagacgagaaccatgctgcctcccgtaggagt

SEQ ID NO: 271 - DNA, 8 bp, Artificial sequence
  Synthetic
acgagatg

SEQ ID NO: 272 - DNA, 48 bp, Artificial sequence
  Synthetic
gcctccctcgcgccatcagacgagatgcatgctgcctcccgtaggagt

SEQ ID NO: 273 - DNA, 8 bp, Artificial sequence
  Synthetic
acgagtag

SEQ ID NO: 274 - DNA, 48 bp, Artificial sequence
  Synthetic
gcctccctcgcgccatcagacgagtagcatgctgcctcccgtaggagt

SEQ ID NO: 275 - DNA, 8 bp, Artificial sequence
  Synthetic
acgagttc

SEQ ID NO: 276 - DNA, 48 bp, Artificial sequence
  Synthetic
gcctccctcgcgccatcagacgagttccatgctgcctcccgtaggagt

SEQ ID NO: 277 - DNA, 8 bp, Artificial sequence
  Synthetic
acgatcca

SEQ ID NO: 278 - DNA, 48 bp, Artificial sequence
  Synthetic
gcctccctcgcgccatcagacgatccacatgctgcctcccgtaggagt

SEQ ID NO: 279 - DNA, 8 bp, Artificial sequence
  Synthetic
acgatcgt

SEQ ID NO: 280 - DNA, 48 bp, Artificial sequence
  Synthetic
gcctccctcgcgccatcagacgatcgtcatgctgcctcccgtaggagt

SEQ ID NO: 281 - DNA, 8 bp, Artificial sequence
  Synthetic
acgatgct

SEQ ID NO: 282 - DNA, 48 bp, Artificial sequence
  Synthetic
gcctccctcgcgccatcagacgatgctcatgctgcctcccgtaggagt

SEQ ID NO: 283 - DNA, 8 bp, Artificial sequence
  Synthetic
acgatgga

SEQ ID NO: 284 - DNA, 48 bp, Artificial sequence
  Synthetic
gcctccctcgcgccatcagacgatggacatgctgcctcccgtaggagt

SEQ ID NO: 285 - DNA, 8 bp, Artificial sequence
  Synthetic
acgtacca

SEQ ID NO: 286 - DNA, 48 bp, Artificial sequence
  Synthetic
gcctccctcgcgccatcagacgtaccacatgctgcctcccgtaggagt

SEQ ID NO: 287 - DNA, 8 bp, Artificial sequence
  Synthetic
acgtacgt

SEQ ID NO: 288 - DNA, 48 bp, Artificial sequence
  Synthetic
gcctccctcgcgccatcagacgtacgtcatgctgcctcccgtaggagt

SEQ ID NO: 289 - DNA, 8 bp, Artificial sequence
  Synthetic
acgtagct

SEQ ID NO: 290 - DNA, 48 bp, Artificial sequence
  Synthetic
gcctccctcgcgccatcagacgtagctcatgctgcctcccgtaggagt

SEQ ID NO: 291 - DNA, 8 bp, Artificial sequence
  Synthetic
acgtagga

SEQ ID NO: 292 - DNA, 48 bp, Artificial sequence
  Synthetic
gcctccctcgcgccatcagacgtaggacatgctgcctcccgtaggagt

SEQ ID NO: 293 - DNA, 8 bp, Artificial sequence
  Synthetic
acgtcaac

SEQ ID NO: 294 - DNA, 48 bp, Artificial sequence
  Synthetic
gcctccctcgcgccatcagacgtcaaccatgctgcctcccgtaggagt

SEQ ID NO: 295 - DNA, 8 bp, Artificial sequence
  Synthetic
acgtcatg

SEQ ID NO: 296 - DNA, 48 bp, Artificial sequence
  Synthetic
gcctccctcgcgccatcagacgtcatgcatgctgcctcccgtaggagt

SEQ ID NO: 297 - DNA, 8 bp, Artificial sequence
  Synthetic
acgtctag

SEQ ID NO: 298 - DNA, 48 bp, Artificial sequence
  Synthetic
gcctccctcgcgccatcagacgtctagcatgctgcctcccgtaggagt

SEQ ID NO: 299 - DNA, 8 bp, Artificial sequence
  Synthetic
acgtcttc

SEQ ID NO: 300 - DNA, 48 bp, Artificial sequence
  Synthetic
gcctccctcgcgccatcagacgtcttccatgctgcctcccgtaggagt

SEQ ID NO: 301 - DNA, 8 bp, Artificial sequence
  Synthetic
acgtgaag

SEQ ID NO: 302 - DNA, 48 bp, Artificial sequence
  Synthetic
gcctccctcgcgccatcagacgtgaagcatgctgcctcccgtaggagt

SEQ ID NO: 303 - DNA, 8 bp, Artificial sequence
  Synthetic
acgtgatc

SEQ ID NO: 304 - DNA, 48 bp, Artificial sequence
  Synthetic
gcctccctcgcgccatcagacgtgatccatgctgcctcccgtaggagt

SEQ ID NO: 305 - DNA, 8 bp, Artificial sequence
  Synthetic
acgtgtac

SEQ ID NO: 306 - DNA, 48 bp, Artificial sequence
  Synthetic
gcctccctcgcgccatcagacgtgtaccatgctgcctcccgtaggagt

SEQ ID NO: 307 - DNA, 8 bp, Artificial sequence
  Synthetic
acgtgttg

SEQ ID NO: 308 - DNA, 48 bp, Artificial sequence
  Synthetic
gcctccctcgcgccatcagacgtgttgcatgctgcctcccgtaggagt

SEQ ID NO: 309 - DNA, 8 bp, Artificial sequence
  Synthetic
acgttcct

SEQ ID NO: 310 - DNA, 48 bp, Artificial sequence
  Synthetic
gcctccctcgcgccatcagacgttcctcatgctgcctcccgtaggagt

SEQ ID NO: 311 - DNA, 8 bp, Artificial sequence
  Synthetic
acgttcga

SEQ ID NO: 312 - DNA, 48 bp, Artificial sequence
  Synthetic
gcctccctcgcgccatcagacgttcgacatgctgcctcccgtaggagt

SEQ ID NO: 313 - DNA, 8 bp, Artificial sequence
  Synthetic
acgttgca

SEQ ID NO: 314 - DNA, 48 bp, Artificial sequence
  Synthetic
gcctccctcgcgccatcagacgttgcacatgctgcctcccgtaggagt

SEQ ID NO: 315 - DNA, 8 bp, Artificial sequence
  Synthetic
acgttggt

SEQ ID NO: 316 - DNA, 48 bp, Artificial sequence
  Synthetic
gcctccctcgcgccatcagacgttggtcatgctgcctcccgtaggagt

SEQ ID NO: 317 - DNA, 8 bp, Artificial sequence
  Synthetic
actcacag

SEQ ID NO: 318 - DNA, 48 bp, Artificial sequence
  Synthetic
gcctccctcgcgccatcagactcacagcatgctgcctcccgtaggagt

SEQ ID NO: 319 - DNA, 8 bp, Artificial sequence
  Synthetic
actcactc

SEQ ID NO: 320 - DNA, 48 bp, Artificial sequence
  Synthetic
gcctccctcgcgccatcagactcactccatgctgcctcccgtaggagt

SEQ ID NO: 321 - DNA, 8 bp, Artificial sequence
  Synthetic
actcagac

SEQ ID NO: 322 - DNA, 48 bp, Artificial sequence
  Synthetic
gcctccctcgcgccatcagactcagaccatgctgcctcccgtaggagt

SEQ ID NO: 323 - DNA, 8 bp, Artificial sequence
  Synthetic
actcagtg

SEQ ID NO: 324 - DNA, 48 bp, Artificial sequence
  Synthetic
gcctccctcgcgccatcagactcagtgcatgctgcctcccgtaggagt

SEQ ID NO: 325 - DNA, 8 bp, Artificial sequence
  Synthetic
actccact

SEQ ID NO: 326 - DNA, 48 bp, Artificial sequence
  Synthetic
gcctccctcgcgccatcagactccactcatgctgcctcccgtaggagt

SEQ ID NO: 327 - DNA, 8 bp, Artificial sequence
  Synthetic
actccaga

SEQ ID NO: 328 - DNA, 48 bp, Artificial sequence
  Synthetic
gcctccctcgcgccatcagactccagacatgctgcctcccgtaggagt

SEQ ID NO: 329 - DNA, 8 bp, Artificial sequence
  Synthetic
actcctca

SEQ ID NO: 330 - DNA, 48 bp, Artificial sequence
  Synthetic
gcctccctcgcgccatcagactcctcacatgctgcctcccgtaggagt

SEQ ID NO: 331 - DNA, 8 bp, Artificial sequence
  Synthetic
actcctgt

SEQ ID NO: 332 - DNA, 48 bp, Artificial sequence
  Synthetic
gcctccctcgcgccatcagactcctgtcatgctgcctcccgtaggagt

SEQ ID NO: 333 - DNA, 8 bp, Artificial sequence
  Synthetic
actcgaca

SEQ ID NO: 334 - DNA, 48 bp, Artificial sequence
  Synthetic
gcctccctcgcgccatcagactcgacacatgctgcctcccgtaggagt

SEQ ID NO: 335 - DNA, 8 bp, Artificial sequence
  Synthetic
actcgagt

SEQ ID NO: 336 - DNA, 48 bp, Artificial sequence
  Synthetic
gcctccctcgcgccatcagactcgagtcatgctgcctcccgtaggagt

SEQ ID NO: 337 - DNA, 8 bp, Artificial sequence
  Synthetic
actcgtct

SEQ ID NO: 338 - DNA, 48 bp, Artificial sequence
  Synthetic
gcctccctcgcgccatcagactcgtctcatgctgcctcccgtaggagt

SEQ ID NO: 339 - DNA, 8 bp, Artificial sequence
  Synthetic
actcgtga

SEQ ID NO: 340 - DNA, 48 bp, Artificial sequence
  Synthetic
gcctccctcgcgccatcagactcgtgacatgctgcctcccgtaggagt

SEQ ID NO: 341 - DNA, 8 bp, Artificial sequence
  Synthetic
actctcac

SEQ ID NO: 342 - DNA, 48 bp, Artificial sequence
  Synthetic
gcctccctcgcgccatcagactctcaccatgctgcctcccgtaggagt

SEQ ID NO: 343 - DNA, 8 bp, Artificial sequence
  Synthetic
actctctg

SEQ ID NO: 344 - DNA, 48 bp, Artificial sequence
  Synthetic
gcctccctcgcgccatcagactctctgcatgctgcctcccgtaggagt

SEQ ID NO: 345 - DNA, 8 bp, Artificial sequence
  Synthetic
actctgag

SEQ ID NO: 346 - DNA, 48 bp, Artificial sequence
  Synthetic
gcctccctcgcgccatcagactctgagcatgctgcctcccgtaggagt

SEQ ID NO: 347 - DNA, 8 bp, Artificial sequence
  Synthetic
actctgtc

SEQ ID NO: 348 - DNA, 48 bp, Artificial sequence
  Synthetic
gcctccctcgcgccatcagactctgtccatgctgcctcccgtaggagt

SEQ ID NO: 349 - DNA, 8 bp, Artificial sequence
  Synthetic
actgacac

SEQ ID NO: 350 - DNA, 48 bp, Artificial sequence
  Synthetic
gcctccctcgcgccatcagactgacaccatgctgcctcccgtaggagt

SEQ ID NO: 351 - DNA, 8 bp, Artificial sequence
  Synthetic
actgactg

SEQ ID NO: 352 - DNA, 48 bp, Artificial sequence
  Synthetic
gcctccctcgcgccatcagactgactgcatgctgcctcccgtaggagt

SEQ ID NO: 353 - DNA, 8 bp, Artificial sequence
  Synthetic
actgagag

SEQ ID NO: 354 - DNA, 48 bp, Artificial sequence
  Synthetic
gcctccctcgcgccatcagactgagagcatgctgcctcccgtaggagt

SEQ ID NO: 355 - DNA, 8 bp, Artificial sequence
  Synthetic
actgagtc

SEQ ID NO: 356 - DNA, 48 bp, Artificial sequence
  Synthetic
gcctccctcgcgccatcagactgagtccatgctgcctcccgtaggagt

SEQ ID NO: 357 - DNA, 8 bp, Artificial sequence
  Synthetic
actgcaca

SEQ ID NO: 358 - DNA, 48 bp, Artificial sequence
  Synthetic
gcctccctcgcgccatcagactgcacacatgctgcctcccgtaggagt

SEQ ID NO: 359 - DNA, 8 bp, Artificial sequence
  Synthetic
actgcagt

SEQ ID NO: 360 - DNA, 48 bp, Artificial sequence
  Synthetic
gcctccctcgcgccatcagactgcagtcatgctgcctcccgtaggagt

SEQ ID NO: 361 - DNA, 8 bp, Artificial sequence
  Synthetic
actgctct

SEQ ID NO: 362 - DNA, 48 bp, Artificial sequence
  Synthetic
gcctccctcgcgccatcagactgctctcatgctgcctcccgtaggagt

SEQ ID NO: 363 - DNA, 8 bp, Artificial sequence
  Synthetic
actgctga

SEQ ID NO: 364 - DNA, 48 bp, Artificial sequence
  Synthetic
gcctccctcgcgccatcagactgctgacatgctgcctcccgtaggagt

SEQ ID NO: 365 - DNA, 8 bp, Artificial sequence
  Synthetic
actggact

SEQ ID NO: 366 - DNA, 48 bp, Artificial sequence
  Synthetic
gcctccctcgcgccatcagactggactcatgctgcctcccgtaggagt

SEQ ID NO: 367 - DNA, 8 bp, Artificial sequence
  Synthetic
actggaga

SEQ ID NO: 368 - DNA, 48 bp, Artificial sequence
  Synthetic
gcctccctcgcgccatcagactggagacatgctgcctcccgtaggagt

SEQ ID NO: 369 - DNA, 8 bp, Artificial sequence
  Synthetic
actggtca

SEQ ID NO: 370 - DNA, 48 bp, Artificial sequence
  Synthetic
gcctccctcgcgccatcagactggtcacatgctgcctcccgtaggagt

SEQ ID NO: 371 - DNA, 8 bp, Artificial sequence
  Synthetic
actggtgt

SEQ ID NO: 372 - DNA, 48 bp, Artificial sequence
  Synthetic
gcctccctcgcgccatcagactggtgtcatgctgcctcccgtaggagt

SEQ ID NO: 373 - DNA, 8 bp, Artificial sequence
  Synthetic
actgtcag

SEQ ID NO: 374 - DNA, 48 bp, Artificial sequence
  Synthetic
gcctccctcgcgccatcagactgtcagcatgctgcctcccgtaggagt

SEQ ID NO: 375 - DNA, 8 bp, Artificial sequence
  Synthetic
actgtctc

SEQ ID NO: 376 - DNA, 48 bp, Artificial sequence
  Synthetic
gcctccctcgcgccatcagactgtctccatgctgcctcccgtaggagt

SEQ ID NO: 377 - DNA, 8 bp, Artificial sequence
  Synthetic
actgtgac

SEQ ID NO: 378 - DNA, 48 bp, Artificial sequence
  Synthetic
gcctccctcgcgccatcagactgtgaccatgctgcctcccgtaggagt

SEQ ID NO: 379 - DNA, 8 bp, Artificial sequence
  Synthetic
actgtgtg

SEQ ID NO: 380 - DNA, 48 bp, Artificial sequence
  Synthetic
gcctccctcgcgccatcagactgtgtgcatgctgcctcccgtaggagt

SEQ ID NO: 381 - DNA, 8 bp, Artificial sequence
  Synthetic
agacacag

SEQ ID NO: 382 - DNA, 48 bp, Artificial sequence
  Synthetic
gcctccctcgcgccatcagagacacagcatgctgcctcccgtaggagt

SEQ ID NO: 383 - DNA, 8 bp, Artificial sequence
  Synthetic
agacactc

SEQ ID NO: 384 - DNA, 48 bp, Artificial sequence
  Synthetic
gcctccctcgcgccatcagagacactccatgctgcctcccgtaggagt

SEQ ID NO: 385 - DNA, 8 bp, Artificial sequence
  Synthetic
agacagac

SEQ ID NO: 386 - DNA, 48 bp, Artificial sequence
  Synthetic
gcctccctcgcgccatcagagacagaccatgctgcctcccgtaggagt

SEQ ID NO: 387 - DNA, 8 bp, Artificial sequence
  Synthetic
agacagtg

SEQ ID NO: 388 - DNA, 48 bp, Artificial sequence
  Synthetic
gcctccctcgcgccatcagagacagtgcatgctgcctcccgtaggagt

SEQ ID NO: 389 - DNA, 8 bp, Artificial sequence
  Synthetic
agaccact

SEQ ID NO: 390 - DNA, 48 bp, Artificial sequence
  Synthetic
gcctccctcgcgccatcagagaccactcatgctgcctcccgtaggagt

SEQ ID NO: 391 - DNA, 8 bp, Artificial sequence
  Synthetic
agaccaga

SEQ ID NO: 392 - DNA, 48 bp, Artificial sequence
  Synthetic
gcctccctcgcgccatcagagaccagacatgctgcctcccgtaggagt

SEQ ID NO: 393 - DNA, 8 bp, Artificial sequence
  Synthetic
agacctca

SEQ ID NO: 394 - DNA, 48 bp, Artificial sequence
  Synthetic
gcctccctcgcgccatcagagacctcacatgctgcctcccgtaggagt

SEQ ID NO: 395 - DNA, 8 bp, Artificial sequence
  Synthetic
agacctgt

SEQ ID NO: 396 - DNA, 48 bp, Artificial sequence
  Synthetic
gcctccctcgcgccatcagagacctgtcatgctgcctcccgtaggagt

SEQ ID NO: 397 - DNA, 8 bp, Artificial sequence
  Synthetic
agacgaca

SEQ ID NO: 398 - DNA, 48 bp, Artificial sequence
  Synthetic
gcctccctcgcgccatcagagacgacacatgctgcctcccgtaggagt

SEQ ID NO: 399 - DNA, 8 bp, Artificial sequence
  Synthetic
agacgagt

SEQ ID NO: 400 - DNA, 48 bp, Artificial sequence
  Synthetic
gcctccctcgcgccatcagagacgagtcatgctgcctcccgtaggagt

SEQ ID NO: 401 - DNA, 8 bp, Artificial sequence
  Synthetic
agacgtct

SEQ ID NO: 402 - DNA, 48 bp, Artificial sequence
  Synthetic
gcctccctcgcgccatcagagacgtctcatgctgcctcccgtaggagt

SEQ ID NO: 403 - DNA, 8 bp, Artificial sequence
  Synthetic
agacgtga

SEQ ID NO: 404 - DNA, 48 bp, Artificial sequence
  Synthetic
gcctccctcgcgccatcagagacgtgacatgctgcctcccgtaggagt

SEQ ID NO: 405 - DNA, 8 bp, Artificial sequence
  Synthetic
agactcac

SEQ ID NO: 406 - DNA, 48 bp, Artificial sequence
  Synthetic
gcctccctcgcgccatcagagactcaccatgctgcctcccgtaggagt

SEQ ID NO: 407 - DNA, 8 bp, Artificial sequence
  Synthetic
agactctg

SEQ ID NO: 408 - DNA, 48 bp, Artificial sequence
  Synthetic
gcctccctcgcgccatcagagactctgcatgctgcctcccgtaggagt

SEQ ID NO: 409 - DNA, 8 bp, Artificial sequence
  Synthetic
agactgag

SEQ ID NO: 410 - DNA, 48 bp, Artificial sequence
  Synthetic
gcctccctcgcgccatcagagactgagcatgctgcctcccgtaggagt

SEQ ID NO: 411 - DNA, 8 bp, Artificial sequence
  Synthetic
agactgtc

SEQ ID NO: 412 - DNA, 48 bp, Artificial sequence
  Synthetic
gcctccctcgcgccatcagagactgtccatgctgcctcccgtaggagt

SEQ ID NO: 413 - DNA, 8 bp, Artificial sequence
  Synthetic
agagacac

SEQ ID NO: 414 - DNA, 48 bp, Artificial sequence
  Synthetic
gcctccctcgcgccatcagagagacaccatgctgcctcccgtaggagt

SEQ ID NO: 415 - DNA, 8 bp, Artificial sequence
  Synthetic
agagactg

SEQ ID NO: 416 - DNA, 48 bp, Artificial sequence
  Synthetic
gcctccctcgcgccatcagagagactgcatgctgcctcccgtaggagt

SEQ ID NO: 417 - DNA, 8 bp, Artificial sequence
  Synthetic
agagagag

SEQ ID NO: 418 - DNA, 48 bp, Artificial sequence
  Synthetic
gcctccctcgcgccatcagagagagagcatgctgcctcccgtaggagt

SEQ ID NO: 419 - DNA, 8 bp, Artificial sequence
  Synthetic
agagagtc

SEQ ID NO: 420 - DNA, 48 bp, Artificial sequence
  Synthetic
gcctccctcgcgccatcagagagagtccatgctgcctcccgtaggagt

SEQ ID NO: 421 - DNA, 8 bp, Artificial sequence
  Synthetic
agagcaca

SEQ ID NO: 422 - DNA, 48 bp, Artificial sequence
  Synthetic
gcctccctcgcgccatcagagagcacacatgctgcctcccgtaggagt

SEQ ID NO: 423 - DNA, 8 bp, Artificial sequence
  Synthetic
agagcagt

SEQ ID NO: 424 - DNA, 48 bp, Artificial sequence
  Synthetic
gcctccctcgcgccatcagagagcagtcatgctgcctcccgtaggagt

SEQ ID NO: 425 - DNA, 8 bp, Artificial sequence
  Synthetic
agagctct

SEQ ID NO: 426 - DNA, 48 bp, Artificial sequence
  Synthetic
gcctccctcgcgccatcagagagctctcatgctgcctcccgtaggagt

SEQ ID NO: 427 - DNA, 8 bp, Artificial sequence
  Synthetic
agagctga

SEQ ID NO: 428 - DNA, 48 bp, Artificial sequence
  Synthetic
gcctccctcgcgccatcagagagctgacatgctgcctcccgtaggagt

SEQ ID NO: 429 - DNA, 8 bp, Artificial sequence
  Synthetic
agaggact

SEQ ID NO: 430 - DNA, 48 bp, Artificial sequence
  Synthetic
gcctccctcgcgccatcagagaggactcatgctgcctcccgtaggagt

SEQ ID NO: 431 - DNA, 8 bp, Artificial sequence
  Synthetic
agaggaga

SEQ ID NO: 432 - DNA, 48 bp, Artificial sequence
  Synthetic
gcctccctcgcgccatcagagaggagacatgctgcctcccgtaggagt

SEQ ID NO: 433 - DNA, 8 bp, Artificial sequence
  Synthetic
agaggtca

SEQ ID NO: 434 - DNA, 48 bp, Artificial sequence
  Synthetic
gcctccctcgcgccatcagagaggtcacatgctgcctcccgtaggagt

SEQ ID NO: 435 - DNA, 8 bp, Artificial sequence
  Synthetic
agaggtgt

SEQ ID NO: 436 - DNA, 48 bp, Artificial sequence
  Synthetic
gcctccctcgcgccatcagagaggtgtcatgctgcctcccgtaggagt

SEQ ID NO: 437 - DNA, 8 bp, Artificial sequence
  Synthetic
agagtcag

SEQ ID NO: 438 - DNA, 48 bp, Artificial sequence
  Synthetic
gcctccctcgcgccatcagagagtcagcatgctgcctcccgtaggagt

SEQ ID NO: 439 - DNA, 8 bp, Artificial sequence
  Synthetic
agagtctc

SEQ ID NO: 440 - DNA, 48 bp, Artificial sequence
  Synthetic
gcctccctcgcgccatcagagagtctccatgctgcctcccgtaggagt

SEQ ID NO: 441 - DNA, 8 bp, Artificial sequence
  Synthetic
agagtgac

SEQ ID NO: 442 - DNA, 48 bp, Artificial sequence
  Synthetic
gcctccctcgcgccatcagagagtgaccatgctgcctcccgtaggagt

SEQ ID NO: 443 - DNA, 8 bp, Artificial sequence
  Synthetic
agagtgtg

SEQ ID NO: 444 - DNA, 48 bp, Artificial sequence
  Synthetic
gcctccctcgcgccatcagagagtgtgcatgctgcctcccgtaggagt

SEQ ID NO: 445 - DNA, 8 bp, Artificial sequence
  Synthetic
agcaacct

SEQ ID NO: 446 - DNA, 48 bp, Artificial sequence
  Synthetic
gcctccctcgcgccatcagagcaacctcatgctgcctcccgtaggagt

SEQ ID NO: 447 - DNA, 8 bp, Artificial sequence
  Synthetic
agcaacga

SEQ ID NO: 448 - DNA, 48 bp, Artificial sequence
  Synthetic
gcctccctcgcgccatcagagcaacgacatgctgcctcccgtaggagt

SEQ ID NO: 449 - DNA, 8 bp, Artificial sequence
  Synthetic
agcaagca

SEQ ID NO: 450 - DNA, 48 bp, Artificial sequence
  Synthetic
gcctccctcgcgccatcagagcaagcacatgctgcctcccgtaggagt

SEQ ID NO: 451 - DNA, 8 bp, Artificial sequence
  Synthetic
agcaaggt

SEQ ID NO: 452 - DNA, 48 bp, Artificial sequence
  Synthetic
gcctccctcgcgccatcagagcaaggtcatgctgcctcccgtaggagt

SEQ ID NO: 453 - DNA, 8 bp, Artificial sequence
  Synthetic
agcacaag

SEQ ID NO: 454 - DNA, 48 bp, Artificial sequence
  Synthetic
gcctccctcgcgccatcagagcacaagcatgctgcctcccgtaggagt

SEQ ID NO: 455 - DNA, 8 bp, Artificial sequence
  Synthetic
agcacatc

SEQ ID NO: 456 - DNA, 48 bp, Artificial sequence
  Synthetic
gcctccctcgcgccatcagagcacatccatgctgcctcccgtaggagt

SEQ ID NO: 457 - DNA, 8 bp, Artificial sequence
  Synthetic
agcactac

SEQ ID NO: 458 - DNA, 48 bp, Artificial sequence
  Synthetic
gcctccctcgcgccatcagagcactaccatgctgcctcccgtaggagt

SEQ ID NO: 459 - DNA, 8 bp, Artificial sequence
  Synthetic
agcacttg

SEQ ID NO: 460 - DNA, 48 bp, Artificial sequence
  Synthetic
gcctccctcgcgccatcagagcacttgcatgctgcctcccgtaggagt

SEQ ID NO: 461 - DNA, 8 bp, Artificial sequence
  Synthetic
agcagaac

SEQ ID NO: 462 - DNA, 48 bp, Artificial sequence
  Synthetic
gcctccctcgcgccatcagagcagaaccatgctgcctcccgtaggagt

SEQ ID NO: 463 - DNA, 8 bp, Artificial sequence
  Synthetic
agcagatg

SEQ ID NO: 464 - DNA, 48 bp, Artificial sequence
  Synthetic
gcctccctcgcgccatcagagcagatgcatgctgcctcccgtaggagt

SEQ ID NO: 465 - DNA, 8 bp, Artificial sequence
  Synthetic
agcagtag

SEQ ID NO: 466 - DNA, 48 bp, Artificial sequence
  Synthetic
gcctccctcgcgccatcagagcagtagcatgctgcctcccgtaggagt

SEQ ID NO: 467 - DNA, 8 bp, Artificial sequence
  Synthetic
agcagttc

SEQ ID NO: 468 - DNA, 48 bp, Artificial sequence
  Synthetic
gcctccctcgcgccatcagagcagttccatgctgcctcccgtaggagt

SEQ ID NO: 469 - DNA, 8 bp, Artificial sequence
  Synthetic
agcatcca

SEQ ID NO: 470 - DNA, 48 bp, Artificial sequence
  Synthetic
gcctccctcgcgccatcagagcatccacatgctgcctcccgtaggagt

SEQ ID NO: 471 - DNA, 8 bp, Artificial sequence
  Synthetic
agcatcgt

SEQ ID NO: 472 - DNA, 48 bp, Artificial sequence
  Synthetic
gcctccctcgcgccatcagagcatcgtcatgctgcctcccgtaggagt

SEQ ID NO: 473 - DNA, 8 bp, Artificial sequence
  Synthetic
agcatgct

SEQ ID NO: 474 - DNA, 48 bp, Artificial sequence
  Synthetic
gcctccctcgcgccatcagagcatgctcatgctgcctcccgtaggagt

SEQ ID NO: 475 - DNA, 8 bp, Artificial sequence
  Synthetic
agcatgga

SEQ ID NO: 476 - DNA, 48 bp, Artificial sequence
  Synthetic
gcctccctcgcgccatcagagcatggacatgctgcctcccgtaggagt

SEQ ID NO: 477 - DNA, 8 bp, Artificial sequence
  Synthetic
agctacca

SEQ ID NO: 478 - DNA, 48 bp, Artificial sequence
  Synthetic
gcctccctcgcgccatcagagctaccacatgctgcctcccgtaggagt

SEQ ID NO: 479 - DNA, 8 bp, Artificial sequence
  Synthetic
agctacgt

SEQ ID NO: 480 - DNA, 48 bp, Artificial sequence
  Synthetic
gcctccctcgcgccatcagagctacgtcatgctgcctcccgtaggagt

SEQ ID NO: 481 - DNA, 8 bp, Artificial sequence
  Synthetic
agctagct

SEQ ID NO: 482 - DNA, 48 bp, Artificial sequence
  Synthetic
gcctccctcgcgccatcagagctagctcatgctgcctcccgtaggagt

SEQ ID NO: 483 - DNA, 8 bp, Artificial sequence
  Synthetic
agctagga

SEQ ID NO: 484 - DNA, 48 bp, Artificial sequence
  Synthetic
gcctccctcgcgccatcagagctaggacatgctgcctcccgtaggagt

SEQ ID NO: 485 - DNA, 8 bp, Artificial sequence
  Synthetic
agctcaac

SEQ ID NO: 486 - DNA, 48 bp, Artificial sequence
  Synthetic
gcctccctcgcgccatcagagctcaaccatgctgcctcccgtaggagt

SEQ ID NO: 487 - DNA, 8 bp, Artificial sequence
  Synthetic
agctcatg

SEQ ID NO: 488 - DNA, 48 bp, Artificial sequence
  Synthetic
gcctccctcgcgccatcagagctcatgcatgctgcctcccgtaggagt

SEQ ID NO: 489 - DNA, 8 bp, Artificial sequence
  Synthetic
agctctag

SEQ ID NO: 490 - DNA, 48 bp, Artificial sequence
  Synthetic
gcctccctcgcgccatcagagctctagcatgctgcctcccgtaggagt

SEQ ID NO: 491 - DNA, 8 bp, Artificial sequence
  Synthetic
agctcttc

SEQ ID NO: 492 - DNA, 48 bp, Artificial sequence
  Synthetic
gcctccctcgcgccatcagagctcttccatgctgcctcccgtaggagt

SEQ ID NO: 493 - DNA, 8 bp, Artificial sequence
  Synthetic
agctgaag

SEQ ID NO: 494 - DNA, 48 bp, Artificial sequence
  Synthetic
gcctccctcgcgccatcagagctgaagcatgctgcctcccgtaggagt

SEQ ID NO: 495 - DNA, 8 bp, Artificial sequence
  Synthetic
agctgatc

SEQ ID NO: 496 - DNA, 48 bp, Artificial sequence
  Synthetic
gcctccctcgcgccatcagagctgatccatgctgcctcccgtaggagt

SEQ ID NO: 497 - DNA, 8 bp, Artificial sequence
  Synthetic
agctgtac

SEQ ID NO: 498 - DNA, 48 bp, Artificial sequence
  Synthetic
gcctccctcgcgccatcagagctgtaccatgctgcctcccgtaggagt

SEQ ID NO: 499 - DNA, 8 bp, Artificial sequence
  Synthetic
agctgttg

SEQ ID NO: 500 - DNA, 48 bp, Artificial sequence
  Synthetic
gcctccctcgcgccatcagagctgttgcatgctgcctcccgtaggagt

SEQ ID NO: 501 - DNA, 8 bp, Artificial sequence
  Synthetic
agcttcct

SEQ ID NO: 502 - DNA, 48 bp, Artificial sequence
  Synthetic
gcctccctcgcgccatcagagcttcctcatgctgcctcccgtaggagt

SEQ ID NO: 503 - DNA, 8 bp, Artificial sequence
  Synthetic
agcttcga

SEQ ID NO: 504 - DNA, 48 bp, Artificial sequence
  Synthetic
gcctccctcgcgccatcagagcttcgacatgctgcctcccgtaggagt

SEQ ID NO: 505 - DNA, 8 bp, Artificial sequence
  Synthetic
agcttgca

SEQ ID NO: 506 - DNA, 48 bp, Artificial sequence
  Synthetic
gcctccctcgcgccatcagagcttgcacatgctgcctcccgtaggagt

SEQ ID NO: 507 - DNA, 8 bp, Artificial sequence
  Synthetic
agcttggt

SEQ ID NO: 508 - DNA, 48 bp, Artificial sequence
  Synthetic
gcctccctcgcgccatcagagcttggtcatgctgcctcccgtaggagt

SEQ ID NO: 509 - DNA, 8 bp, Artificial sequence
  Synthetic
aggaacca

SEQ ID NO: 510 - DNA, 48 bp, Artificial sequence
  Synthetic
gcctccctcgcgccatcagaggaaccacatgctgcctcccgtaggagt

SEQ ID NO: 511 - DNA, 8 bp, Artificial sequence
  Synthetic
aggaacgt

SEQ ID NO: 512 - DNA, 48 bp, Artificial sequence
  Synthetic
gcctccctcgcgccatcagaggaacgtcatgctgcctcccgtaggagt

SEQ ID NO: 513 - DNA, 8 bp, Artificial sequence
  Synthetic
aggaagct

SEQ ID NO: 514 - DNA, 48 bp, Artificial sequence
  Synthetic
gcctccctcgcgccatcagaggaagctcatgctgcctcccgtaggagt

SEQ ID NO: 515 - DNA, 8 bp, Artificial sequence
  Synthetic
aggaagga

SEQ ID NO: 516 - DNA, 48 bp, Artificial sequence
  Synthetic
gcctccctcgcgccatcagaggaaggacatgctgcctcccgtaggagt

SEQ ID NO: 517 - DNA, 8 bp, Artificial sequence
  Synthetic
aggacaac

SEQ ID NO: 518 - DNA, 48 bp, Artificial sequence
  Synthetic
gcctccctcgcgccatcagaggacaaccatgctgcctcccgtaggagt

SEQ ID NO: 519 - DNA, 8 bp, Artificial sequence
  Synthetic
aggacatg

SEQ ID NO: 520 - DNA, 48 bp, Artificial sequence
  Synthetic
gcctccctcgcgccatcagaggacatgcatgctgcctcccgtaggagt

SEQ ID NO: 521 - DNA, 8 bp, Artificial sequence
  Synthetic
aggactag

SEQ ID NO: 522 - DNA, 48 bp, Artificial sequence
  Synthetic
gcctccctcgcgccatcagaggactagcatgctgcctcccgtaggagt

SEQ ID NO: 523 - DNA, 8 bp, Artificial sequence
  Synthetic
aggacttc

SEQ ID NO: 524 - DNA, 48 bp, Artificial sequence
  Synthetic
gcctccctcgcgccatcagaggacttccatgctgcctcccgtaggagt

SEQ ID NO: 525 - DNA, 8 bp, Artificial sequence
  Synthetic
aggagaag

SEQ ID NO: 526 - DNA, 48 bp, Artificial sequence
  Synthetic
gcctccctcgcgccatcagaggagaagcatgctgcctcccgtaggagt

SEQ ID NO: 527 - DNA, 8 bp, Artificial sequence
  Synthetic
aggagatc

SEQ ID NO: 528 - DNA, 48 bp, Artificial sequence
  Synthetic
gcctccctcgcgccatcagaggagatccatgctgcctcccgtaggagt

SEQ ID NO: 529 - DNA, 8 bp, Artificial sequence
  Synthetic
aggagtac

SEQ ID NO: 530 - DNA, 48 bp, Artificial sequence
  Synthetic
gcctccctcgcgccatcagaggagtaccatgctgcctcccgtaggagt

SEQ ID NO: 531 - DNA, 8 bp, Artificial sequence
  Synthetic
aggagttg

SEQ ID NO: 532 - DNA, 48 bp, Artificial sequence
  Synthetic
gcctccctcgcgccatcagaggagttgcatgctgcctcccgtaggagt

SEQ ID NO: 533 - DNA, 8 bp, Artificial sequence
  Synthetic
aggatcct

SEQ ID NO: 534 - DNA, 48 bp, Artificial sequence
  Synthetic
gcctccctcgcgccatcagaggatcctcatgctgcctcccgtaggagt

SEQ ID NO: 535 - DNA, 8 bp, Artificial sequence
  Synthetic
aggatcga

SEQ ID NO: 536 - DNA, 48 bp, Artificial sequence
  Synthetic
gcctccctcgcgccatcagaggatcgacatgctgcctcccgtaggagt

SEQ ID NO: 537 - DNA, 8 bp, Artificial sequence
  Synthetic
aggatgca

SEQ ID NO: 538 - DNA, 48 bp, Artificial sequence
  Synthetic
gcctccctcgcgccatcagaggatgcacatgctgcctcccgtaggagt

SEQ ID NO: 539 - DNA, 8 bp, Artificial sequence
  Synthetic
aggatggt

SEQ ID NO: 540 - DNA, 48 bp, Artificial sequence
  Synthetic
gcctccctcgcgccatcagaggatggtcatgctgcctcccgtaggagt

SEQ ID NO: 541 - DNA, 8 bp, Artificial sequence
  Synthetic
aggtacct

SEQ ID NO: 542 - DNA, 48 bp, Artificial sequence
  Synthetic
gcctccctcgcgccatcagaggtacctcatgctgcctcccgtaggagt

SEQ ID NO: 543 - DNA, 8 bp, Artificial sequence
  Synthetic
aggtacga

SEQ ID NO: 544 - DNA, 48 bp, Artificial sequence
  Synthetic
gcctccctcgcgccatcagaggtacgacatgctgcctcccgtaggagt

SEQ ID NO: 545 - DNA, 8 bp, Artificial sequence
  Synthetic
aggtagca

SEQ ID NO: 546 - DNA, 48 bp, Artificial sequence
  Synthetic
gcctccctcgcgccatcagaggtagcacatgctgcctcccgtaggagt

SEQ ID NO: 547 - DNA, 8 bp, Artificial sequence
  Synthetic
aggtaggt

SEQ ID NO: 548 - DNA, 48 bp, Artificial sequence
  Synthetic
gcctccctcgcgccatcagaggtaggtcatgctgcctcccgtaggagt

SEQ ID NO: 549 - DNA, 8 bp, Artificial sequence
  Synthetic
aggtcaag

SEQ ID NO: 550 - DNA, 48 bp, Artificial sequence
  Synthetic
gcctccctcgcgccatcagaggtcaagcatgctgcctcccgtaggagt

SEQ ID NO: 551 - DNA, 8 bp, Artificial sequence
  Synthetic
aggtcatc

SEQ ID NO: 552 - DNA, 48 bp, Artificial sequence
  Synthetic
gcctccctcgcgccatcagaggtcatccatgctgcctcccgtaggagt

SEQ ID NO: 553 - DNA, 8 bp, Artificial sequence
  Synthetic
aggtctac

SEQ ID NO: 554 - DNA, 48 bp, Artificial sequence
  Synthetic
gcctccctcgcgccatcagaggtctaccatgctgcctcccgtaggagt

SEQ ID NO: 555 - DNA, 8 bp, Artificial sequence
  Synthetic
aggtcttg

SEQ ID NO: 556 - DNA, 48 bp, Artificial sequence
  Synthetic
gcctccctcgcgccatcagaggtcttgcatgctgcctcccgtaggagt

SEQ ID NO: 557 - DNA, 8 bp, Artificial sequence
  Synthetic
aggtgaac

SEQ ID NO: 558 - DNA, 48 bp, Artificial sequence
  Synthetic
gcctccctcgcgccatcagaggtgaaccatgctgcctcccgtaggagt

SEQ ID NO: 559 - DNA, 8 bp, Artificial sequence
  Synthetic
aggtgatg

SEQ ID NO: 560 - DNA, 48 bp, Artificial sequence
  Synthetic
gcctccctcgcgccatcagaggtgatgcatgctgcctcccgtaggagt

SEQ ID NO: 561 - DNA, 8 bp, Artificial sequence
  Synthetic
aggtgtag

SEQ ID NO: 562 - DNA, 48 bp, Artificial sequence
  Synthetic
gcctccctcgcgccatcagaggtgtagcatgctgcctcccgtaggagt

SEQ ID NO: 563 - DNA, 8 bp, Artificial sequence
  Synthetic
aggtgttc

SEQ ID NO: 564 - DNA, 48 bp, Artificial sequence
  Synthetic
gcctccctcgcgccatcagaggtgttccatgctgcctcccgtaggagt

SEQ ID NO: 565 - DNA, 8 bp, Artificial sequence
  Synthetic
aggttcca

SEQ ID NO: 566 - DNA, 48 bp, Artificial sequence
  Synthetic
gcctccctcgcgccatcagaggttccacatgctgcctcccgtaggagt

SEQ ID NO: 567 - DNA, 8 bp, Artificial sequence
  Synthetic
aggttcgt

SEQ ID NO: 568 - DNA, 48 bp, Artificial sequence
  Synthetic
gcctccctcgcgccatcagaggttcgtcatgctgcctcccgtaggagt

SEQ ID NO: 569 - DNA, 8 bp, Artificial sequence
  Synthetic
aggttgct

SEQ ID NO: 570 - DNA, 48 bp, Artificial sequence
  Synthetic
gcctccctcgcgccatcagaggttgctcatgctgcctcccgtaggagt

SEQ ID NO: 571 - DNA, 8 bp, Artificial sequence
  Synthetic
aggttgga

SEQ ID NO: 572 - DNA, 48 bp, Artificial sequence
  Synthetic
gcctccctcgcgccatcagaggttggacatgctgcctcccgtaggagt

SEQ ID NO: 573 - DNA, 8 bp, Artificial sequence
  Synthetic
agtcacac

SEQ ID NO: 574 - DNA, 48 bp, Artificial sequence
  Synthetic
gcctccctcgcgccatcagagtcacaccatgctgcctcccgtaggagt

SEQ ID NO: 575 - DNA, 8 bp, Artificial sequence
  Synthetic
agtcactg

SEQ ID NO: 576 - DNA, 48 bp, Artificial sequence
  Synthetic
gcctccctcgcgccatcagagtcactgcatgctgcctcccgtaggagt

SEQ ID NO: 577 - DNA, 8 bp, Artificial sequence
  Synthetic
agtcagag

SEQ ID NO: 578 - DNA, 48 bp, Artificial sequence
  Synthetic
gcctccctcgcgccatcagagtcagagcatgctgcctcccgtaggagt

SEQ ID NO: 579 - DNA, 8 bp, Artificial sequence
  Synthetic
agtcagtc

SEQ ID NO: 580 - DNA, 48 bp, Artificial sequence
  Synthetic
gcctccctcgcgccatcagagtcagtccatgctgcctcccgtaggagt

SEQ ID NO: 581 - DNA, 8 bp, Artificial sequence
  Synthetic
agtccaca

SEQ ID NO: 582 - DNA, 48 bp, Artificial sequence
  Synthetic
gcctccctcgcgccatcagagtccacacatgctgcctcccgtaggagt

SEQ ID NO: 583 - DNA, 8 bp, Artificial sequence
  Synthetic
agtccagt

SEQ ID NO: 584 - DNA, 48 bp, Artificial sequence
  Synthetic
gcctccctcgcgccatcagagtccagtcatgctgcctcccgtaggagt

SEQ ID NO: 585 - DNA, 8 bp, Artificial sequence
  Synthetic
agtcctct

SEQ ID NO: 586 - DNA, 48 bp, Artificial sequence
  Synthetic
gcctccctcgcgccatcagagtcctctcatgctgcctcccgtaggagt

SEQ ID NO: 587 - DNA, 8 bp, Artificial sequence
  Synthetic
agtcctga

SEQ ID NO: 588 - DNA, 48 bp, Artificial sequence
  Synthetic
gcctccctcgcgccatcagagtcctgacatgctgcctcccgtaggagt

SEQ ID NO: 589 - DNA, 8 bp, Artificial sequence
  Synthetic
agtcgact

SEQ ID NO: 590 - DNA, 48 bp, Artificial sequence
  Synthetic
gcctccctcgcgccatcagagtcgactcatgctgcctcccgtaggagt

SEQ ID NO: 591 - DNA, 8 bp, Artificial sequence
  Synthetic
agtcgaga

SEQ ID NO: 592 - DNA, 48 bp, Artificial sequence
  Synthetic
gcctccctcgcgccatcagagtcgagacatgctgcctcccgtaggagt

SEQ ID NO: 593 - DNA, 8 bp, Artificial sequence
  Synthetic
agtcgtca

SEQ ID NO: 594 - DNA, 48 bp, Artificial sequence
  Synthetic
gcctccctcgcgccatcagagtcgtcacatgctgcctcccgtaggagt

SEQ ID NO: 595 - DNA, 8 bp, Artificial sequence
  Synthetic
agtcgtgt

SEQ ID NO: 596 - DNA, 48 bp, Artificial sequence
  Synthetic
gcctccctcgcgccatcagagtcgtgtcatgctgcctcccgtaggagt

SEQ ID NO: 597 - DNA, 8 bp, Artificial sequence
  Synthetic
agtctcag

SEQ ID NO: 598 - DNA, 48 bp, Artificial sequence
  Synthetic
gcctccctcgcgccatcagagtctcagcatgctgcctcccgtaggagt

SEQ ID NO: 599 - DNA, 8 bp, Artificial sequence
  Synthetic
agtctctc

SEQ ID NO: 600 - DNA, 48 bp, Artificial sequence
  Synthetic
gcctccctcgcgccatcagagtctctccatgctgcctcccgtaggagt

SEQ ID NO: 601 - DNA, 8 bp, Artificial sequence
  Synthetic
agtctgac

SEQ ID NO: 602 - DNA, 48 bp, Artificial sequence
  Synthetic
gcctccctcgcgccatcagagtctgaccatgctgcctcccgtaggagt

SEQ ID NO: 603 - DNA, 8 bp, Artificial sequence
  Synthetic
agtctgtg

SEQ ID NO: 604 - DNA, 48 bp, Artificial sequence
  Synthetic
gcctccctcgcgccatcagagtctgtgcatgctgcctcccgtaggagt

SEQ ID NO: 605 - DNA, 8 bp, Artificial sequence
  Synthetic
agtgacag

SEQ ID NO: 606 - DNA, 48 bp, Artificial sequence
  Synthetic
gcctccctcgcgccatcagagtgacagcatgctgcctcccgtaggagt

SEQ ID NO: 607 - DNA, 8 bp, Artificial sequence
  Synthetic
agtgactc

SEQ ID NO: 608 - DNA, 48 bp, Artificial sequence
  Synthetic
gcctccctcgcgccatcagagtgactccatgctgcctcccgtaggagt

SEQ ID NO: 609 - DNA, 8 bp, Artificial sequence
  Synthetic
agtgagac

SEQ ID NO: 610 - DNA, 48 bp, Artificial sequence
  Synthetic
gcctccctcgcgccatcagagtgagaccatgctgcctcccgtaggagt

SEQ ID NO: 611 - DNA, 8 bp, Artificial sequence
  Synthetic
agtgagtg

SEQ ID NO: 612 - DNA, 48 bp, Artificial sequence
  Synthetic
gcctccctcgcgccatcagagtgagtgcatgctgcctcccgtaggagt

SEQ ID NO: 613 - DNA, 8 bp, Artificial sequence
  Synthetic
agtgcact

SEQ ID NO: 614 - DNA, 48 bp, Artificial sequence
  Synthetic
gcctccctcgcgccatcagagtgcactcatgctgcctcccgtaggagt

SEQ ID NO: 615 - DNA, 8 bp, Artificial sequence
  Synthetic
agtgcaga

SEQ ID NO: 616 - DNA, 48 bp, Artificial sequence
  Synthetic
gcctccctcgcgccatcagagtgcagacatgctgcctcccgtaggagt

SEQ ID NO: 617 - DNA, 8 bp, Artificial sequence
  Synthetic
agtgctca

SEQ ID NO: 618 - DNA, 48 bp, Artificial sequence
  Synthetic
gcctccctcgcgccatcagagtgctcacatgctgcctcccgtaggagt

SEQ ID NO: 619 - DNA, 8 bp, Artificial sequence
  Synthetic
agtgctgt

SEQ ID NO: 620 - DNA, 48 bp, Artificial sequence
  Synthetic
gcctccctcgcgccatcagagtgctgtcatgctgcctcccgtaggagt

SEQ ID NO: 621 - DNA, 8 bp, Artificial sequence
  Synthetic
agtggaca

SEQ ID NO: 622 - DNA, 48 bp, Artificial sequence
  Synthetic
gcctccctcgcgccatcagagtggacacatgctgcctcccgtaggagt

SEQ ID NO: 623 - DNA, 8 bp, Artificial sequence
  Synthetic
agtggagt

SEQ ID NO: 624 - DNA, 48 bp, Artificial sequence
  Synthetic
gcctccctcgcgccatcagagtggagtcatgctgcctcccgtaggagt

SEQ ID NO: 625 - DNA, 8 bp, Artificial sequence
  Synthetic
agtggtct

SEQ ID NO: 626 - DNA, 48 bp, Artificial sequence
  Synthetic
gcctccctcgcgccatcagagtggtctcatgctgcctcccgtaggagt

SEQ ID NO: 627 - DNA, 8 bp, Artificial sequence
  Synthetic
agtggtga

SEQ ID NO: 628 - DNA, 48 bp, Artificial sequence
  Synthetic
gcctccctcgcgccatcagagtggtgacatgctgcctcccgtaggagt

SEQ ID NO: 629 - DNA, 8 bp, Artificial sequence
  Synthetic
agtgtcac

SEQ ID NO: 630 - DNA, 48 bp, Artificial sequence
  Synthetic
gcctccctcgcgccatcagagtgtcaccatgctgcctcccgtaggagt

SEQ ID NO: 631 - DNA, 8 bp, Artificial sequence
  Synthetic
agtgtctg

SEQ ID NO: 632 - DNA, 48 bp, Artificial sequence
  Synthetic
gcctccctcgcgccatcagagtgtctgcatgctgcctcccgtaggagt

SEQ ID NO: 633 - DNA, 8 bp, Artificial sequence
  Synthetic
agtgtgag

SEQ ID NO: 634 - DNA, 48 bp, Artificial sequence
  Synthetic
gcctccctcgcgccatcagagtgtgagcatgctgcctcccgtaggagt

SEQ ID NO: 635 - DNA, 8 bp, Artificial sequence
  Synthetic
agtgtgtc

SEQ ID NO: 636 - DNA, 48 bp, Artificial sequence
  Synthetic
gcctccctcgcgccatcagagtgtgtccatgctgcctcccgtaggagt

SEQ ID NO: 637 - DNA, 8 bp, Artificial sequence
  Synthetic
ataaccgc

SEQ ID NO: 638 - DNA, 48 bp, Artificial sequence
  Synthetic
gcctccctcgcgccatcagataaccgccatgctgcctcccgtaggagt

SEQ ID NO: 639 - DNA, 8 bp, Artificial sequence
  Synthetic
ataacgcc

SEQ ID NO: 640 - DNA, 48 bp, Artificial sequence
  Synthetic
gcctccctcgcgccatcagataacgcccatgctgcctcccgtaggagt

SEQ ID NO: 641 - DNA, 8 bp, Artificial sequence
  Synthetic
ataagcgg

SEQ ID NO: 642 - DNA, 48 bp, Artificial sequence
  Synthetic
gcctccctcgcgccatcagataagcggcatgctgcctcccgtaggagt

SEQ ID NO: 643 - DNA, 8 bp, Artificial sequence
  Synthetic
ataaggcg

SEQ ID NO: 644 - DNA, 48 bp, Artificial sequence
  Synthetic
gcctccctcgcgccatcagataaggcgcatgctgcctcccgtaggagt

SEQ ID NO: 645 - DNA, 8 bp, Artificial sequence
  Synthetic
atatccgg

SEQ ID NO: 646 - DNA, 48 bp, Artificial sequence
  Synthetic
gcctccctcgcgccatcagatatccggcatgctgcctcccgtaggagt

SEQ ID NO: 647 - DNA, 8 bp, Artificial sequence
  Synthetic
atatcgcg

SEQ ID NO: 648 - DNA, 48 bp, Artificial sequence
  Synthetic
gcctccctcgcgccatcagatatcgcgcatgctgcctcccgtaggagt

SEQ ID NO: 649 - DNA, 8 bp, Artificial sequence
  Synthetic
atatcggc

SEQ ID NO: 650 - DNA, 48 bp, Artificial sequence
  Synthetic
gcctccctcgcgccatcagatatcggccatgctgcctcccgtaggagt

SEQ ID NO: 651 - DNA, 8 bp, Artificial sequence
  Synthetic
atatgccg

SEQ ID NO: 652 - DNA, 48 bp, Artificial sequence
  Synthetic
gcctccctcgcgccatcagatatgccgcatgctgcctcccgtaggagt

SEQ ID NO: 653 - DNA, 8 bp, Artificial sequence
  Synthetic
atatgcgc

SEQ ID NO: 654 - DNA, 48 bp, Artificial sequence
  Synthetic
gcctccctcgcgccatcagatatgcgccatgctgcctcccgtaggagt

SEQ ID NO: 655 - DNA, 8 bp, Artificial sequence
  Synthetic
atatggcc

SEQ ID NO: 656 - DNA, 48 bp, Artificial sequence
  Synthetic
gcctccctcgcgccatcagatatggcccatgctgcctcccgtaggagt

SEQ ID NO: 657 - DNA, 8 bp, Artificial sequence
  Synthetic
atccaacg

SEQ ID NO: 658 - DNA, 48 bp, Artificial sequence
  Synthetic
gcctccctcgcgccatcagatccaacgcatgctgcctcccgtaggagt

SEQ ID NO: 659 - DNA, 8 bp, Artificial sequence
  Synthetic
atccaagc

SEQ ID NO: 660 - DNA, 48 bp, Artificial sequence
  Synthetic
gcctccctcgcgccatcagatccaagccatgctgcctcccgtaggagt

SEQ ID NO: 661 - DNA, 8 bp, Artificial sequence
  Synthetic
atccatcc

SEQ ID NO: 662 - DNA, 48 bp, Artificial sequence
  Synthetic
gcctccctcgcgccatcagatccatcccatgctgcctcccgtaggagt

SEQ ID NO: 663 - DNA, 8 bp, Artificial sequence
  Synthetic
atccatgg

SEQ ID NO: 664 - DNA, 48 bp, Artificial sequence
  Synthetic
gcctccctcgcgccatcagatccatggcatgctgcctcccgtaggagt

SEQ ID NO: 665 - DNA, 8 bp, Artificial sequence
  Synthetic
atccgcaa

SEQ ID NO: 666 - DNA, 48 bp, Artificial sequence
  Synthetic
gcctccctcgcgccatcagatccgcaacatgctgcctcccgtaggagt

SEQ ID NO: 667 - DNA, 8 bp, Artificial sequence
  Synthetic
atccgctt

SEQ ID NO: 668 - DNA, 48 bp, Artificial sequence
  Synthetic
gcctccctcgcgccatcagatccgcttcatgctgcctcccgtaggagt

SEQ ID NO: 669 - DNA, 8 bp, Artificial sequence
  Synthetic
atccggat

SEQ ID NO: 670 - DNA, 48 bp, Artificial sequence
  Synthetic
gcctccctcgcgccatcagatccggatcatgctgcctcccgtaggagt

SEQ ID NO: 671 - DNA, 8 bp, Artificial sequence
  Synthetic
atccggta

SEQ ID NO: 672 - DNA, 48 bp, Artificial sequence
  Synthetic
gcctccctcgcgccatcagatccggtacatgctgcctcccgtaggagt

SEQ ID NO: 673 - DNA, 8 bp, Artificial sequence
  Synthetic
atcctacc

SEQ ID NO: 674 - DNA, 48 bp, Artificial sequence
  Synthetic
gcctccctcgcgccatcagatcctacccatgctgcctcccgtaggagt

SEQ ID NO: 675 - DNA, 8 bp, Artificial sequence
  Synthetic
atcctagg

SEQ ID NO: 676 - DNA, 48 bp, Artificial sequence
  Synthetic
gcctccctcgcgccatcagatcctaggcatgctgcctcccgtaggagt

SEQ ID NO: 677 - DNA, 8 bp, Artificial sequence
  Synthetic
atccttcg

SEQ ID NO: 678 - DNA, 48 bp, Artificial sequence
  Synthetic
gcctccctcgcgccatcagatccttcgcatgctgcctcccgtaggagt

SEQ ID NO: 679 - DNA, 8 bp, Artificial sequence
  Synthetic
atccttgc

SEQ ID NO: 680 - DNA, 48 bp, Artificial sequence
  Synthetic
gcctccctcgcgccatcagatccttgccatgctgcctcccgtaggagt

SEQ ID NO: 681 - DNA, 8 bp, Artificial sequence
  Synthetic
atcgaacc

SEQ ID NO: 682 - DNA, 48 bp, Artificial sequence
  Synthetic
gcctccctcgcgccatcagatcgaacccatgctgcctcccgtaggagt

SEQ ID NO: 683 - DNA, 8 bp, Artificial sequence
  Synthetic
atcgaagg

SEQ ID NO: 684 - DNA, 48 bp, Artificial sequence
  Synthetic
gcctccctcgcgccatcagatcgaaggcatgctgcctcccgtaggagt

SEQ ID NO: 685 - DNA, 8 bp, Artificial sequence
  Synthetic
atcgatcg

SEQ ID NO: 686 - DNA, 48 bp, Artificial sequence
  Synthetic
gcctccctcgcgccatcagatcgatcgcatgctgcctcccgtaggagt

SEQ ID NO: 687 - DNA, 8 bp, Artificial sequence
  Synthetic
atcgatgc

SEQ ID NO: 688 - DNA, 48 bp, Artificial sequence
  Synthetic
gcctccctcgcgccatcagatcgatgccatgctgcctcccgtaggagt

SEQ ID NO: 689 - DNA, 8 bp, Artificial sequence
  Synthetic
atcgccaa

SEQ ID NO: 690 - DNA, 48 bp, Artificial sequence
  Synthetic
gcctccctcgcgccatcagatcgccaacatgctgcctcccgtaggagt

SEQ ID NO: 691 - DNA, 8 bp, Artificial sequence
  Synthetic
atcgcctt

SEQ ID NO: 692 - DNA, 48 bp, Artificial sequence
  Synthetic
gcctccctcgcgccatcagatcgccttcatgctgcctcccgtaggagt

SEQ ID NO: 693 - DNA, 8 bp, Artificial sequence
  Synthetic
atcgcgat

SEQ ID NO: 694 - DNA, 48 bp, Artificial sequence
  Synthetic
gcctccctcgcgccatcagatcgcgatcatgctgcctcccgtaggagt

SEQ ID NO: 695 - DNA, 8 bp, Artificial sequence
  Synthetic
atcgcgta

SEQ ID NO: 696 - DNA, 48 bp, Artificial sequence
  Synthetic
gcctccctcgcgccatcagatcgcgtacatgctgcctcccgtaggagt

SEQ ID NO: 697 - DNA, 8 bp, Artificial sequence
  Synthetic
atcggcat

SEQ ID NO: 698 - DNA, 48 bp, Artificial sequence
  Synthetic
gcctccctcgcgccatcagatcggcatcatgctgcctcccgtaggagt

SEQ ID NO: 699 - DNA, 8 bp, Artificial sequence
  Synthetic
atcggcta

SEQ ID NO: 700 - DNA, 48 bp, Artificial sequence
  Synthetic
gcctccctcgcgccatcagatcggctacatgctgcctcccgtaggagt

SEQ ID NO: 701 - DNA, 8 bp, Artificial sequence
  Synthetic
atcgtacg

SEQ ID NO: 702 - DNA, 48 bp, Artificial sequence
  Synthetic
gcctccctcgcgccatcagatcgtacgcatgctgcctcccgtaggagt

SEQ ID NO: 703 - DNA, 8 bp, Artificial sequence
  Synthetic
atcgtagc

SEQ ID NO: 704 - DNA, 48 bp, Artificial sequence
  Synthetic
gcctccctcgcgccatcagatcgtagccatgctgcctcccgtaggagt

SEQ ID NO: 705 - DNA, 8 bp, Artificial sequence
  Synthetic
atcgttcc

SEQ ID NO: 706 - DNA, 48 bp, Artificial sequence
  Synthetic
gcctccctcgcgccatcagatcgttcccatgctgcctcccgtaggagt

SEQ ID NO: 707 - DNA, 8 bp, Artificial sequence
  Synthetic
atcgttgg

SEQ ID NO: 708 - DNA, 48 bp, Artificial sequence
  Synthetic
gcctccctcgcgccatcagatcgttggcatgctgcctcccgtaggagt

SEQ ID NO: 709 - DNA, 8 bp, Artificial sequence
  Synthetic
atgcaacc

SEQ ID NO: 710 - DNA, 48 bp, Artificial sequence
  Synthetic
gcctccctcgcgccatcagatgcaacccatgctgcctcccgtaggagt

SEQ ID NO: 711 - DNA, 8 bp, Artificial sequence
  Synthetic
atgcaagg

SEQ ID NO: 712 - DNA, 48 bp, Artificial sequence
  Synthetic
gcctccctcgcgccatcagatgcaaggcatgctgcctcccgtaggagt

SEQ ID NO: 713 - DNA, 8 bp, Artificial sequence
  Synthetic
atgcatcg

SEQ ID NO: 714 - DNA, 48 bp, Artificial sequence
  Synthetic
gcctccctcgcgccatcagatgcatcgcatgctgcctcccgtaggagt

SEQ ID NO: 715 - DNA, 8 bp, Artificial sequence
  Synthetic
atgcatgc

SEQ ID NO: 716 - DNA, 48 bp, Artificial sequence
  Synthetic
gcctccctcgcgccatcagatgcatgccatgctgcctcccgtaggagt

SEQ ID NO: 717 - DNA, 8 bp, Artificial sequence
  Synthetic
atgccgat

SEQ ID NO: 718 - DNA, 48 bp, Artificial sequence
  Synthetic
gcctccctcgcgccatcagatgccgatcatgctgcctcccgtaggagt

SEQ ID NO: 719 - DNA, 8 bp, Artificial sequence
  Synthetic
atgccgta

SEQ ID NO: 720 - DNA, 48 bp, Artificial sequence
  Synthetic
gcctccctcgcgccatcagatgccgtacatgctgcctcccgtaggagt

SEQ ID NO: 721 - DNA, 8 bp, Artificial sequence
  Synthetic
atgcgcat

SEQ ID NO: 722 - DNA, 48 bp, Artificial sequence
  Synthetic
gcctccctcgcgccatcagatgcgcatcatgctgcctcccgtaggagt

SEQ ID NO: 723 - DNA, 8 bp, Artificial sequence
  Synthetic
atgcgcta

SEQ ID NO: 724 - DNA, 48 bp, Artificial sequence
  Synthetic
gcctccctcgcgccatcagatgcgctacatgctgcctcccgtaggagt

SEQ ID NO: 725 - DNA, 8 bp, Artificial sequence
  Synthetic
atgcggaa

SEQ ID NO: 726 - DNA, 48 bp, Artificial sequence
  Synthetic
gcctccctcgcgccatcagatgcggaacatgctgcctcccgtaggagt

SEQ ID NO: 727 - DNA, 8 bp, Artificial sequence
  Synthetic
atgcggtt

SEQ ID NO: 728 - DNA, 48 bp, Artificial sequence
  Synthetic
gcctccctcgcgccatcagatgcggttcatgctgcctcccgtaggagt

SEQ ID NO: 729 - DNA, 8 bp, Artificial sequence
  Synthetic
atgctacg

SEQ ID NO: 730 - DNA, 48 bp, Artificial sequence
  Synthetic
gcctccctcgcgccatcagatgctacgcatgctgcctcccgtaggagt

SEQ ID NO: 731 - DNA, 8 bp, Artificial sequence
  Synthetic
atgctagc

SEQ ID NO: 732 - DNA, 48 bp, Artificial sequence
  Synthetic
gcctccctcgcgccatcagatgctagccatgctgcctcccgtaggagt

SEQ ID NO: 733 - DNA, 8 bp, Artificial sequence
  Synthetic
atgcttcc

SEQ ID NO: 734 - DNA, 48 bp, Artificial sequence
  Synthetic
gcctccctcgcgccatcagatgcttcccatgctgcctcccgtaggagt

SEQ ID NO: 735 - DNA, 8 bp, Artificial sequence
  Synthetic
atgcttgg

SEQ ID NO: 736 - DNA, 48 bp, Artificial sequence
  Synthetic
gcctccctcgcgccatcagatgcttggcatgctgcctcccgtaggagt

SEQ ID NO: 737 - DNA, 8 bp, Artificial sequence
  Synthetic
atggaacg

SEQ ID NO: 738 - DNA, 48 bp, Artificial sequence
  Synthetic
gcctccctcgcgccatcagatggaacgcatgctgcctcccgtaggagt

SEQ ID NO: 739 - DNA, 8 bp, Artificial sequence
  Synthetic
atggaagc

SEQ ID NO: 740 - DNA, 48 bp, Artificial sequence
  Synthetic
gcctccctcgcgccatcagatggaagccatgctgcctcccgtaggagt

SEQ ID NO: 741 - DNA, 8 bp, Artificial sequence
  Synthetic
atggatcc

SEQ ID NO: 742 - DNA, 48 bp, Artificial sequence
  Synthetic
gcctccctcgcgccatcagatggatcccatgctgcctcccgtaggagt

SEQ ID NO: 743 - DNA, 8 bp, Artificial sequence
  Synthetic
atggatgg

SEQ ID NO: 744 - DNA, 48 bp, Artificial sequence
  Synthetic
gcctccctcgcgccatcagatggatggcatgctgcctcccgtaggagt

SEQ ID NO: 745 - DNA, 8 bp, Artificial sequence
  Synthetic
atggccat

SEQ ID NO: 746 - DNA, 48 bp, Artificial sequence
  Synthetic
gcctccctcgcgccatcagatggccatcatgctgcctcccgtaggagt

SEQ ID NO: 747 - DNA, 8 bp, Artificial sequence
  Synthetic
atggccta

SEQ ID NO: 748 - DNA, 48 bp, Artificial sequence
  Synthetic
gcctccctcgcgccatcagatggcctacatgctgcctcccgtaggagt

SEQ ID NO: 749 - DNA, 8 bp, Artificial sequence
  Synthetic
atggcgaa

SEQ ID NO: 750 - DNA, 48 bp, Artificial sequence
  Synthetic
gcctccctcgcgccatcagatggcgaacatgctgcctcccgtaggagt

SEQ ID NO: 751 - DNA, 8 bp, Artificial sequence
  Synthetic
atggcgtt

SEQ ID NO: 752 - DNA, 48 bp, Artificial sequence
  Synthetic
gcctccctcgcgccatcagatggcgttcatgctgcctcccgtaggagt

SEQ ID NO: 753 - DNA, 8 bp, Artificial sequence
  Synthetic
atggtacc

SEQ ID NO: 754 - DNA, 48 bp, Artificial sequence
  Synthetic
gcctccctcgcgccatcagatggtacccatgctgcctcccgtaggagt

SEQ ID NO: 755 - DNA, 8 bp, Artificial sequence
  Synthetic
atggtagg

SEQ ID NO: 756 - DNA, 48 bp, Artificial sequence
  Synthetic
gcctccctcgcgccatcagatggtaggcatgctgcctcccgtaggagt

SEQ ID NO: 757 - DNA, 8 bp, Artificial sequence
  Synthetic
atggttcg

SEQ ID NO: 758 - DNA, 48 bp, Artificial sequence
  Synthetic
gcctccctcgcgccatcagatggttcgcatgctgcctcccgtaggagt

SEQ ID NO: 759 - DNA, 8 bp, Artificial sequence
  Synthetic
atggttgc

SEQ ID NO: 760 - DNA, 48 bp, Artificial sequence
  Synthetic
gcctccctcgcgccatcagatggttgccatgctgcctcccgtaggagt

SEQ ID NO: 761 - DNA, 8 bp, Artificial sequence
  Synthetic
attaccgg

SEQ ID NO: 762 - DNA, 48 bp, Artificial sequence
  Synthetic
gcctccctcgcgccatcagattaccggcatgctgcctcccgtaggagt

SEQ ID NO: 763 - DNA, 8 bp, Artificial sequence
  Synthetic
attacgcg

SEQ ID NO: 764 - DNA, 48 bp, Artificial sequence
  Synthetic
gcctccctcgcgccatcagattacgcgcatgctgcctcccgtaggagt

SEQ ID NO: 765 - DNA, 8 bp, Artificial sequence
  Synthetic
attacggc

SEQ ID NO: 766 - DNA, 48 bp, Artificial sequence
  Synthetic
gcctccctcgcgccatcagattacggccatgctgcctcccgtaggagt

SEQ ID NO: 767 - DNA, 8 bp, Artificial sequence
  Synthetic
attagccg

SEQ ID NO: 768 - DNA, 48 bp, Artificial sequence
  Synthetic
gcctccctcgcgccatcagattagccgcatgctgcctcccgtaggagt

SEQ ID NO: 769 - DNA, 8 bp, Artificial sequence
  Synthetic
attagcgc

SEQ ID NO: 770 - DNA, 48 bp, Artificial sequence
  Synthetic
gcctccctcgcgccatcagattagcgccatgctgcctcccgtaggagt

SEQ ID NO: 771 - DNA, 8 bp, Artificial sequence
  Synthetic
attaggcc

SEQ ID NO: 772 - DNA, 48 bp, Artificial sequence
  Synthetic
gcctccctcgcgccatcagattaggcccatgctgcctcccgtaggagt

SEQ ID NO: 773 - DNA, 8 bp, Artificial sequence
  Synthetic
caacacca

SEQ ID NO: 774 - DNA, 48 bp, Artificial sequence
  Synthetic
gcctccctcgcgccatcagcaacaccacatgctgcctcccgtaggagt

SEQ ID NO: 775 - DNA, 8 bp, Artificial sequence
  Synthetic
caacacgt

SEQ ID NO: 776 - DNA, 48 bp, Artificial sequence
  Synthetic
gcctccctcgcgccatcagcaacacgtcatgctgcctcccgtaggagt

SEQ ID NO: 777 - DNA, 8 bp, Artificial sequence
  Synthetic
caacagct

SEQ ID NO: 778 - DNA, 48 bp, Artificial sequence
  Synthetic
gcctccctcgcgccatcagcaacagctcatgctgcctcccgtaggagt

SEQ ID NO: 779 - DNA, 8 bp, Artificial sequence
  Synthetic
caacagga

SEQ ID NO: 780 - DNA, 48 bp, Artificial sequence
  Synthetic
gcctccctcgcgccatcagcaacaggacatgctgcctcccgtaggagt

SEQ ID NO: 781 - DNA, 8 bp, Artificial sequence
  Synthetic
caaccaac

SEQ ID NO: 782 - DNA, 48 bp, Artificial sequence
  Synthetic
gcctccctcgcgccatcagcaaccaaccatgctgcctcccgtaggagt

SEQ ID NO: 783 - DNA, 8 bp, Artificial sequence
  Synthetic
caaccatg

SEQ ID NO: 784 - DNA, 48 bp, Artificial sequence
  Synthetic
gcctccctcgcgccatcagcaaccatgcatgctgcctcccgtaggagt

SEQ ID NO: 785 - DNA, 8 bp, Artificial sequence
  Synthetic
caacctag

SEQ ID NO: 786 - DNA, 48 bp, Artificial sequence
  Synthetic
gcctccctcgcgccatcagcaacctagcatgctgcctcccgtaggagt

SEQ ID NO: 787 - DNA, 8 bp, Artificial sequence
  Synthetic
caaccttc

SEQ ID NO: 788 - DNA, 48 bp, Artificial sequence
  Synthetic
gcctccctcgcgccatcagcaaccttccatgctgcctcccgtaggagt

SEQ ID NO: 789 - DNA, 8 bp, Artificial sequence
  Synthetic
caacgaag

SEQ ID NO: 790 - DNA, 48 bp, Artificial sequence
  Synthetic
gcctccctcgcgccatcagcaacgaagcatgctgcctcccgtaggagt

SEQ ID NO: 791 - DNA, 8 bp, Artificial sequence
  Synthetic
caacgatc

SEQ ID NO: 792 - DNA, 48 bp, Artificial sequence
  Synthetic
gcctccctcgcgccatcagcaacgatccatgctgcctcccgtaggagt

SEQ ID NO: 793 - DNA, 8 bp, Artificial sequence
  Synthetic
caacgtac

SEQ ID NO: 794 - DNA, 48 bp, Artificial sequence
  Synthetic
gcctccctcgcgccatcagcaacgtaccatgctgcctcccgtaggagt

SEQ ID NO: 795 - DNA, 8 bp, Artificial sequence
  Synthetic
caacgttg

SEQ ID NO: 796 - DNA, 48 bp, Artificial sequence
  Synthetic
gcctccctcgcgccatcagcaacgttgcatgctgcctcccgtaggagt

SEQ ID NO: 797 - DNA, 8 bp, Artificial sequence
  Synthetic
caactcct

SEQ ID NO: 798 - DNA, 48 bp, Artificial sequence
  Synthetic
gcctccctcgcgccatcagcaactcctcatgctgcctcccgtaggagt

SEQ ID NO: 799 - DNA, 8 bp, Artificial sequence
  Synthetic
caactcga

SEQ ID NO: 800 - DNA, 48 bp, Artificial sequence
  Synthetic
gcctccctcgcgccatcagcaactcgacatgctgcctcccgtaggagt

SEQ ID NO: 801 - DNA, 8 bp, Artificial sequence
  Synthetic
caactgca

SEQ ID NO: 802 - DNA, 48 bp, Artificial sequence
  Synthetic
gcctccctcgcgccatcagcaactgcacatgctgcctcccgtaggagt

SEQ ID NO: 803 - DNA, 8 bp, Artificial sequence
  Synthetic
caactggt

SEQ ID NO: 804 - DNA, 48 bp, Artificial sequence
  Synthetic
gcctccctcgcgccatcagcaactggtcatgctgcctcccgtaggagt

SEQ ID NO: 805 - DNA, 8 bp, Artificial sequence
  Synthetic
caagacct

SEQ ID NO: 806 - DNA, 48 bp, Artificial sequence
  Synthetic
gcctccctcgcgccatcagcaagacctcatgctgcctcccgtaggagt

SEQ ID NO: 807 - DNA, 8 bp, Artificial sequence
  Synthetic
caagacga

SEQ ID NO: 808 - DNA, 48 bp, Artificial sequence
  Synthetic
gcctccctcgcgccatcagcaagacgacatgctgcctcccgtaggagt

SEQ ID NO: 809 - DNA, 8 bp, Artificial sequence
  Synthetic
caagagca

SEQ ID NO: 810 - DNA, 48 bp, Artificial sequence
  Synthetic
gcctccctcgcgccatcagcaagagcacatgctgcctcccgtaggagt

SEQ ID NO: 811 - DNA, 8 bp, Artificial sequence
  Synthetic
caagaggt

SEQ ID NO: 812 - DNA, 48 bp, Artificial sequence
  Synthetic
gcctccctcgcgccatcagcaagaggtcatgctgcctcccgtaggagt

SEQ ID NO: 813 - DNA, 8 bp, Artificial sequence
  Synthetic
caagcaag

SEQ ID NO: 814 - DNA, 48 bp, Artificial sequence
  Synthetic
gcctccctcgcgccatcagcaagcaagcatgctgcctcccgtaggagt

SEQ ID NO: 815 - DNA, 8 bp, Artificial sequence
  Synthetic
caagcatc

SEQ ID NO: 816 - DNA, 48 bp, Artificial sequence
  Synthetic
gcctccctcgcgccatcagcaagcatccatgctgcctcccgtaggagt

SEQ ID NO: 817 - DNA, 8 bp, Artificial sequence
  Synthetic
caagctac

SEQ ID NO: 818 - DNA, 48 bp, Artificial sequence
  Synthetic
gcctccctcgcgccatcagcaagctaccatgctgcctcccgtaggagt

SEQ ID NO: 819 - DNA, 8 bp, Artificial sequence
  Synthetic
caagcttg

SEQ ID NO: 820 - DNA, 48 bp, Artificial sequence
  Synthetic
gcctccctcgcgccatcagcaagcttgcatgctgcctcccgtaggagt

SEQ ID NO: 821 - DNA, 8 bp, Artificial sequence
  Synthetic
caaggaac

SEQ ID NO: 822 - DNA, 48 bp, Artificial sequence
  Synthetic
gcctccctcgcgccatcagcaaggaaccatgctgcctcccgtaggagt

SEQ ID NO: 823 - DNA, 8 bp, Artificial sequence
  Synthetic
caaggatg

SEQ ID NO: 824 - DNA, 48 bp, Artificial sequence
  Synthetic
gcctccctcgcgccatcagcaaggatgcatgctgcctcccgtaggagt

SEQ ID NO: 825 - DNA, 8 bp, Artificial sequence
  Synthetic
caaggtag

SEQ ID NO: 826 - DNA, 48 bp, Artificial sequence
  Synthetic
gcctccctcgcgccatcagcaaggtagcatgctgcctcccgtaggagt

SEQ ID NO: 827 - DNA, 8 bp, Artificial sequence
  Synthetic
caaggttc

SEQ ID NO: 828 - DNA, 48 bp, Artificial sequence
  Synthetic
gcctccctcgcgccatcagcaaggttccatgctgcctcccgtaggagt

SEQ ID NO: 829 - DNA, 8 bp, Artificial sequence
  Synthetic
caagtcca

SEQ ID NO: 830 - DNA, 48 bp, Artificial sequence
  Synthetic
gcctccctcgcgccatcagcaagtccacatgctgcctcccgtaggagt

SEQ ID NO: 831 - DNA, 8 bp, Artificial sequence
  Synthetic
caagtcgt

SEQ ID NO: 832 - DNA, 48 bp, Artificial sequence
  Synthetic
gcctccctcgcgccatcagcaagtcgtcatgctgcctcccgtaggagt

SEQ ID NO: 833 - DNA, 8 bp, Artificial sequence
  Synthetic
caagtgct

SEQ ID NO: 834 - DNA, 48 bp, Artificial sequence
  Synthetic
gcctccctcgcgccatcagcaagtgctcatgctgcctcccgtaggagt

SEQ ID NO: 835 - DNA, 8 bp, Artificial sequence
  Synthetic
caagtgga

SEQ ID NO: 836 - DNA, 48 bp, Artificial sequence
  Synthetic
gcctccctcgcgccatcagcaagtggacatgctgcctcccgtaggagt

SEQ ID NO: 837 - DNA, 8 bp, Artificial sequence
  Synthetic
cacaacac

SEQ ID NO: 838 - DNA, 48 bp, Artificial sequence
  Synthetic
gcctccctcgcgccatcagcacaacaccatgctgcctcccgtaggagt

SEQ ID NO: 839 - DNA, 8 bp, Artificial sequence
  Synthetic
cacaactg

SEQ ID NO: 840 - DNA, 48 bp, Artificial sequence
  Synthetic
gcctccctcgcgccatcagcacaactgcatgctgcctcccgtaggagt

SEQ ID NO: 841 - DNA, 8 bp, Artificial sequence
  Synthetic
cacaagag

SEQ ID NO: 842 - DNA, 48 bp, Artificial sequence
  Synthetic
gcctccctcgcgccatcagcacaagagcatgctgcctcccgtaggagt

SEQ ID NO: 843 - DNA, 8 bp, Artificial sequence
  Synthetic
cacaagtc

SEQ ID NO: 844 - DNA, 48 bp, Artificial sequence
  Synthetic
gcctccctcgcgccatcagcacaagtccatgctgcctcccgtaggagt

SEQ ID NO: 845 - DNA, 8 bp, Artificial sequence
  Synthetic
cacacaca

SEQ ID NO: 846 - DNA, 48 bp, Artificial sequence
  Synthetic
gcctccctcgcgccatcagcacacacacatgctgcctcccgtaggagt

SEQ ID NO: 847 - DNA, 8 bp, Artificial sequence
  Synthetic
cacacagt

SEQ ID NO: 848 - DNA, 48 bp, Artificial sequence
  Synthetic
gcctccctcgcgccatcagcacacagtcatgctgcctcccgtaggagt

SEQ ID NO: 849 - DNA, 8 bp, Artificial sequence
  Synthetic
cacactct

SEQ ID NO: 850 - DNA, 48 bp, Artificial sequence
  Synthetic
gcctccctcgcgccatcagcacactctcatgctgcctcccgtaggagt

SEQ ID NO: 851 - DNA, 8 bp, Artificial sequence
  Synthetic
cacactga

SEQ ID NO: 852 - DNA, 48 bp, Artificial sequence
  Synthetic
gcctccctcgcgccatcagcacactgacatgctgcctcccgtaggagt

SEQ ID NO: 853 - DNA, 8 bp, Artificial sequence
  Synthetic
cacagact

SEQ ID NO: 854 - DNA, 48 bp, Artificial sequence
  Synthetic
gcctccctcgcgccatcagcacagactcatgctgcctcccgtaggagt

SEQ ID NO: 855 - DNA, 8 bp, Artificial sequence
  Synthetic
cacagaga

SEQ ID NO: 856 - DNA, 48 bp, Artificial sequence
  Synthetic
gcctccctcgcgccatcagcacagagacatgctgcctcccgtaggagt

SEQ ID NO: 857 - DNA, 8 bp, Artificial sequence
  Synthetic
cacagtca

SEQ ID NO: 858 - DNA, 48 bp, Artificial sequence
  Synthetic
gcctccctcgcgccatcagcacagtcacatgctgcctcccgtaggagt

SEQ ID NO: 859 - DNA, 8 bp, Artificial sequence
  Synthetic
cacagtgt

SEQ ID NO: 860 - DNA, 48 bp, Artificial sequence
  Synthetic
gcctccctcgcgccatcagcacagtgtcatgctgcctcccgtaggagt

SEQ ID NO: 861 - DNA, 8 bp, Artificial sequence
  Synthetic
cacatcag

SEQ ID NO: 862 - DNA, 48 bp, Artificial sequence
  Synthetic
gcctccctcgcgccatcagcacatcagcatgctgcctcccgtaggagt

SEQ ID NO: 863 - DNA, 8 bp, Artificial sequence
  Synthetic
cacatctc

SEQ ID NO: 864 - DNA, 48 bp, Artificial sequence
  Synthetic
gcctccctcgcgccatcagcacatctccatgctgcctcccgtaggagt

SEQ ID NO: 865 - DNA, 8 bp, Artificial sequence
  Synthetic
cacatgac

SEQ ID NO: 866 - DNA, 48 bp, Artificial sequence
  Synthetic
gcctccctcgcgccatcagcacatgaccatgctgcctcccgtaggagt

SEQ ID NO: 867 - DNA, 8 bp, Artificial sequence
  Synthetic
cacatgtg

SEQ ID NO: 868 - DNA, 48 bp, Artificial sequence
  Synthetic
gcctccctcgcgccatcagcacatgtgcatgctgcctcccgtaggagt

SEQ ID NO: 869 - DNA, 8 bp, Artificial sequence
  Synthetic
cactacag

SEQ ID NO: 870 - DNA, 48 bp, Artificial sequence
  Synthetic
gcctccctcgcgccatcagcactacagcatgctgcctcccgtaggagt

SEQ ID NO: 871 - DNA, 8 bp, Artificial sequence
  Synthetic
cactactc

SEQ ID NO: 872 - DNA, 48 bp, Artificial sequence
  Synthetic
gcctccctcgcgccatcagcactactccatgctgcctcccgtaggagt

SEQ ID NO: 873 - DNA, 8 bp, Artificial sequence
  Synthetic
cactagac

SEQ ID NO: 874 - DNA, 48 bp, Artificial sequence
  Synthetic
gcctccctcgcgccatcagcactagaccatgctgcctcccgtaggagt

SEQ ID NO: 875 - DNA, 8 bp, Artificial sequence
  Synthetic
cactagtg

SEQ ID NO: 876 - DNA, 48 bp, Artificial sequence
  Synthetic
gcctccctcgcgccatcagcactagtgcatgctgcctcccgtaggagt

SEQ ID NO: 877 - DNA, 8 bp, Artificial sequence
  Synthetic
cactcact

SEQ ID NO: 878 - DNA, 48 bp, Artificial sequence
  Synthetic
gcctccctcgcgccatcagcactcactcatgctgcctcccgtaggagt

SEQ ID NO: 879 - DNA, 8 bp, Artificial sequence
  Synthetic
cactcaga

SEQ ID NO: 880 - DNA, 48 bp, Artificial sequence
  Synthetic
gcctccctcgcgccatcagcactcagacatgctgcctcccgtaggagt

SEQ ID NO: 881 - DNA, 8 bp, Artificial sequence
  Synthetic
cactctca

SEQ ID NO: 882 - DNA, 48 bp, Artificial sequence
  Synthetic
gcctccctcgcgccatcagcactctcacatgctgcctcccgtaggagt

SEQ ID NO: 883 - DNA, 8 bp, Artificial sequence
  Synthetic
cactctgt

SEQ ID NO: 884 - DNA, 48 bp, Artificial sequence
  Synthetic
gcctccctcgcgccatcagcactctgtcatgctgcctcccgtaggagt

SEQ ID NO: 885 - DNA, 8 bp, Artificial sequence
  Synthetic
cactgaca

SEQ ID NO: 886 - DNA, 48 bp, Artificial sequence
  Synthetic
gcctccctcgcgccatcagcactgacacatgctgcctcccgtaggagt

SEQ ID NO: 887 - DNA, 8 bp, Artificial sequence
  Synthetic
cactgagt

SEQ ID NO: 888 - DNA, 48 bp, Artificial sequence
  Synthetic
gcctccctcgcgccatcagcactgagtcatgctgcctcccgtaggagt

SEQ ID NO: 889 - DNA, 8 bp, Artificial sequence
  Synthetic
cactgtct

SEQ ID NO: 890 - DNA, 48 bp, Artificial sequence
  Synthetic
gcctccctcgcgccatcagcactgtctcatgctgcctcccgtaggagt

SEQ ID NO: 891 - DNA, 8 bp, Artificial sequence
  Synthetic
cactgtga

SEQ ID NO: 892 - DNA, 48 bp, Artificial sequence
  Synthetic
gcctccctcgcgccatcagcactgtgacatgctgcctcccgtaggagt

SEQ ID NO: 893 - DNA, 8 bp, Artificial sequence
  Synthetic
cacttcac

SEQ ID NO: 894 - DNA, 48 bp, Artificial sequence
  Synthetic
gcctccctcgcgccatcagcacttcaccatgctgcctcccgtaggagt

SEQ ID NO: 895 - DNA, 8 bp, Artificial sequence
  Synthetic
cacttctg

SEQ ID NO: 896 - DNA, 48 bp, Artificial sequence
  Synthetic
gcctccctcgcgccatcagcacttctgcatgctgcctcccgtaggagt

SEQ ID NO: 897 - DNA, 8 bp, Artificial sequence
  Synthetic
cacttgag

SEQ ID NO: 898 - DNA, 48 bp, Artificial sequence
  Synthetic
gcctccctcgcgccatcagcacttgagcatgctgcctcccgtaggagt

SEQ ID NO: 899 - DNA, 8 bp, Artificial sequence
  Synthetic
cacttgtc

SEQ ID NO: 900 - DNA, 48 bp, Artificial sequence
  Synthetic
gcctccctcgcgccatcagcacttgtccatgctgcctcccgtaggagt

SEQ ID NO: 901 - DNA, 8 bp, Artificial sequence
  Synthetic
cagaacag

SEQ ID NO: 902 - DNA, 48 bp, Artificial sequence
  Synthetic
gcctccctcgcgccatcagcagaacagcatgctgcctcccgtaggagt

SEQ ID NO: 903 - DNA, 8 bp, Artificial sequence
  Synthetic
cagaactc

SEQ ID NO: 904 - DNA, 48 bp, Artificial sequence
  Synthetic
gcctccctcgcgccatcagcagaactccatgctgcctcccgtaggagt

SEQ ID NO: 905 - DNA, 8 bp, Artificial sequence
  Synthetic
cagaagac

SEQ ID NO: 906 - DNA, 48 bp, Artificial sequence
  Synthetic
gcctccctcgcgccatcagcagaagaccatgctgcctcccgtaggagt

SEQ ID NO: 907 - DNA, 8 bp, Artificial sequence
  Synthetic
cagaagtg

SEQ ID NO: 908 - DNA, 48 bp, Artificial sequence
  Synthetic
gcctccctcgcgccatcagcagaagtgcatgctgcctcccgtaggagt

SEQ ID NO: 909 - DNA, 8 bp, Artificial sequence
  Synthetic
cagacact

SEQ ID NO: 910 - DNA, 48 bp, Artificial sequence
  Synthetic
gcctccctcgcgccatcagcagacactcatgctgcctcccgtaggagt

SEQ ID NO: 911 - DNA, 8 bp, Artificial sequence
  Synthetic
cagacaga

SEQ ID NO: 912 - DNA, 48 bp, Artificial sequence
  Synthetic
gcctccctcgcgccatcagcagacagacatgctgcctcccgtaggagt

SEQ ID NO: 913 - DNA, 8 bp, Artificial sequence
  Synthetic
cagactca

SEQ ID NO: 914 - DNA, 48 bp, Artificial sequence
  Synthetic
gcctccctcgcgccatcagcagactcacatgctgcctcccgtaggagt

SEQ ID NO: 915 - DNA, 8 bp, Artificial sequence
  Synthetic
cagactgt

SEQ ID NO: 916 - DNA, 48 bp, Artificial sequence
  Synthetic
gcctccctcgcgccatcagcagactgtcatgctgcctcccgtaggagt

SEQ ID NO: 917 - DNA, 8 bp, Artificial sequence
  Synthetic
cagagaca

SEQ ID NO: 918 - DNA, 48 bp, Artificial sequence
  Synthetic
gcctccctcgcgccatcagcagagacacatgctgcctcccgtaggagt

SEQ ID NO: 919 - DNA, 8 bp, Artificial sequence
  Synthetic
cagagagt

SEQ ID NO: 920 - DNA, 48 bp, Artificial sequence
  Synthetic
gcctccctcgcgccatcagcagagagtcatgctgcctcccgtaggagt

SEQ ID NO: 921 - DNA, 8 bp, Artificial sequence
  Synthetic
cagagtct

SEQ ID NO: 922 - DNA, 48 bp, Artificial sequence
  Synthetic
gcctccctcgcgccatcagcagagtctcatgctgcctcccgtaggagt

SEQ ID NO: 923 - DNA, 8 bp, Artificial sequence
  Synthetic
cagagtga

SEQ ID NO: 924 - DNA, 48 bp, Artificial sequence
  Synthetic
gcctccctcgcgccatcagcagagtgacatgctgcctcccgtaggagt

SEQ ID NO: 925 - DNA, 8 bp, Artificial sequence
  Synthetic
cagatcac

SEQ ID NO: 926 - DNA, 48 bp, Artificial sequence
  Synthetic
gcctccctcgcgccatcagcagatcaccatgctgcctcccgtaggagt

SEQ ID NO: 927 - DNA, 8 bp, Artificial sequence
  Synthetic
cagatctg

SEQ ID NO: 928 - DNA, 48 bp, Artificial sequence
  Synthetic
gcctccctcgcgccatcagcagatctgcatgctgcctcccgtaggagt

SEQ ID NO: 929 - DNA, 8 bp, Artificial sequence
  Synthetic
cagatgag

SEQ ID NO: 930 - DNA, 48 bp, Artificial sequence
  Synthetic
gcctccctcgcgccatcagcagatgagcatgctgcctcccgtaggagt

SEQ ID NO: 931 - DNA, 8 bp, Artificial sequence
  Synthetic
cagatgtc

SEQ ID NO: 932 - DNA, 48 bp, Artificial sequence
  Synthetic
gcctccctcgcgccatcagcagatgtccatgctgcctcccgtaggagt

SEQ ID NO: 933 - DNA, 8 bp, Artificial sequence
  Synthetic
cagtacac

SEQ ID NO: 934 - DNA, 48 bp, Artificial sequence
  Synthetic
gcctccctcgcgccatcagcagtacaccatgctgcctcccgtaggagt

SEQ ID NO: 935 - DNA, 8 bp, Artificial sequence
  Synthetic
cagtactg

SEQ ID NO: 936 - DNA, 48 bp, Artificial sequence
  Synthetic
gcctccctcgcgccatcagcagtactgcatgctgcctcccgtaggagt

SEQ ID NO: 937 - DNA, 8 bp, Artificial sequence
  Synthetic
cagtagag

SEQ ID NO: 938 - DNA, 48 bp, Artificial sequence
  Synthetic
gcctccctcgcgccatcagcagtagagcatgctgcctcccgtaggagt

SEQ ID NO: 939 - DNA, 8 bp, Artificial sequence
  Synthetic
cagtagtc

SEQ ID NO: 940 - DNA, 48 bp, Artificial sequence
  Synthetic
gcctccctcgcgccatcagcagtagtccatgctgcctcccgtaggagt

SEQ ID NO: 941 - DNA, 8 bp, Artificial sequence
  Synthetic
cagtcaca

SEQ ID NO: 942 - DNA, 48 bp, Artificial sequence
  Synthetic
gcctccctcgcgccatcagcagtcacacatgctgcctcccgtaggagt

SEQ ID NO: 943 - DNA, 8 bp, Artificial sequence
  Synthetic
cagtcagt

SEQ ID NO: 944 - DNA, 48 bp, Artificial sequence
  Synthetic
gcctccctcgcgccatcagcagtcagtcatgctgcctcccgtaggagt

SEQ ID NO: 945 - DNA, 8 bp, Artificial sequence
  Synthetic
cagtctct

SEQ ID NO: 946 - DNA, 48 bp, Artificial sequence
  Synthetic
gcctccctcgcgccatcagcagtctctcatgctgcctcccgtaggagt

SEQ ID NO: 947 - DNA, 8 bp, Artificial sequence
  Synthetic
cagtctga

SEQ ID NO: 948 - DNA, 48 bp, Artificial sequence
  Synthetic
gcctccctcgcgccatcagcagtctgacatgctgcctcccgtaggagt

SEQ ID NO: 949 - DNA, 8 bp, Artificial sequence
  Synthetic
cagtgact

SEQ ID NO: 950 - DNA, 48 bp, Artificial sequence
  Synthetic
gcctccctcgcgccatcagcagtgactcatgctgcctcccgtaggagt

SEQ ID NO: 951 - DNA, 8 bp, Artificial sequence
  Synthetic
cagtgaga

SEQ ID NO: 952 - DNA, 48 bp, Artificial sequence
  Synthetic
gcctccctcgcgccatcagcagtgagacatgctgcctcccgtaggagt

SEQ ID NO: 953 - DNA, 8 bp, Artificial sequence
  Synthetic
cagtgtca

SEQ ID NO: 954 - DNA, 48 bp, Artificial sequence
  Synthetic
gcctccctcgcgccatcagcagtgtcacatgctgcctcccgtaggagt

SEQ ID NO: 955 - DNA, 8 bp, Artificial sequence
  Synthetic
cagtgtgt

SEQ ID NO: 956 - DNA, 48 bp, Artificial sequence
  Synthetic
gcctccctcgcgccatcagcagtgtgtcatgctgcctcccgtaggagt

SEQ ID NO: 957 - DNA, 8 bp, Artificial sequence
  Synthetic
cagttcag

SEQ ID NO: 958 - DNA, 48 bp, Artificial sequence
  Synthetic
gcctccctcgcgccatcagcagttcagcatgctgcctcccgtaggagt

SEQ ID NO: 959 - DNA, 8 bp, Artificial sequence
  Synthetic
cagttctc

SEQ ID NO: 960 - DNA, 48 bp, Artificial sequence
  Synthetic
gcctccctcgcgccatcagcagttctccatgctgcctcccgtaggagt

SEQ ID NO: 961 - DNA, 8 bp, Artificial sequence
  Synthetic
cagttgac

SEQ ID NO: 962 - DNA, 48 bp, Artificial sequence
  Synthetic
gcctccctcgcgccatcagcagttgaccatgctgcctcccgtaggagt

SEQ ID NO: 963 - DNA, 8 bp, Artificial sequence
  Synthetic
cagttgtg

SEQ ID NO: 964 - DNA, 48 bp, Artificial sequence
  Synthetic
gcctccctcgcgccatcagcagttgtgcatgctgcctcccgtaggagt

SEQ ID NO: 965 - DNA, 8 bp, Artificial sequence
  Synthetic
catcacct

SEQ ID NO: 966 - DNA, 48 bp, Artificial sequence
  Synthetic
gcctccctcgcgccatcagcatcacctcatgctgcctcccgtaggagt

SEQ ID NO: 967 - DNA, 8 bp, Artificial sequence
  Synthetic
catcacga

SEQ ID NO: 968 - DNA, 48 bp, Artificial sequence
  Synthetic
gcctccctcgcgccatcagcatcacgacatgctgcctcccgtaggagt

SEQ ID NO: 969 - DNA, 8 bp, Artificial sequence
  Synthetic
catcagca

SEQ ID NO: 970 - DNA, 48 bp, Artificial sequence
  Synthetic
gcctccctcgcgccatcagcatcagcacatgctgcctcccgtaggagt

SEQ ID NO: 971 - DNA, 8 bp, Artificial sequence
  Synthetic
catcaggt

SEQ ID NO: 972 - DNA, 48 bp, Artificial sequence
  Synthetic
gcctccctcgcgccatcagcatcaggtcatgctgcctcccgtaggagt

SEQ ID NO: 973 - DNA, 8 bp, Artificial sequence
  Synthetic
catccaag

SEQ ID NO: 974 - DNA, 48 bp, Artificial sequence
  Synthetic
gcctccctcgcgccatcagcatccaagcatgctgcctcccgtaggagt

SEQ ID NO: 975 - DNA, 8 bp, Artificial sequence
  Synthetic
catccatc

SEQ ID NO: 976 - DNA, 48 bp, Artificial sequence
  Synthetic
gcctccctcgcgccatcagcatccatccatgctgcctcccgtaggagt

SEQ ID NO: 977 - DNA, 8 bp, Artificial sequence
  Synthetic
catcctac

SEQ ID NO: 978 - DNA, 48 bp, Artificial sequence
  Synthetic
gcctccctcgcgccatcagcatcctaccatgctgcctcccgtaggagt

SEQ ID NO: 979 - DNA, 8 bp, Artificial sequence
  Synthetic
catccttg

SEQ ID NO: 980 - DNA, 48 bp, Artificial sequence
  Synthetic
gcctccctcgcgccatcagcatccttgcatgctgcctcccgtaggagt

SEQ ID NO: 981 - DNA, 8 bp, Artificial sequence
  Synthetic
catcgaac

SEQ ID NO: 982 - DNA, 48 bp, Artificial sequence
  Synthetic
gcctccctcgcgccatcagcatcgaaccatgctgcctcccgtaggagt

SEQ ID NO: 983 - DNA, 8 bp, Artificial sequence
  Synthetic
catcgatg

SEQ ID NO: 984 - DNA, 48 bp, Artificial sequence
  Synthetic
gcctccctcgcgccatcagcatcgatgcatgctgcctcccgtaggagt

SEQ ID NO: 985 - DNA, 8 bp, Artificial sequence
  Synthetic
catcgtag

SEQ ID NO: 986 - DNA, 48 bp, Artificial sequence
  Synthetic
gcctccctcgcgccatcagcatcgtagcatgctgcctcccgtaggagt

SEQ ID NO: 987 - DNA, 8 bp, Artificial sequence
  Synthetic
catcgttc

SEQ ID NO: 988 - DNA, 48 bp, Artificial sequence
  Synthetic
gcctccctcgcgccatcagcatcgttccatgctgcctcccgtaggagt

SEQ ID NO: 989 - DNA, 8 bp, Artificial sequence
  Synthetic
catctcca

SEQ ID NO: 990 - DNA, 48 bp, Artificial sequence
  Synthetic
gcctccctcgcgccatcagcatctccacatgctgcctcccgtaggagt

SEQ ID NO: 991 - DNA, 8 bp, Artificial sequence
  Synthetic
catctcgt

SEQ ID NO: 992 - DNA, 48 bp, Artificial sequence
  Synthetic
gcctccctcgcgccatcagcatctcgtcatgctgcctcccgtaggagt

SEQ ID NO: 993 - DNA, 8 bp, Artificial sequence
  Synthetic
catctgct

SEQ ID NO: 994 - DNA, 48 bp, Artificial sequence
  Synthetic
gcctccctcgcgccatcagcatctgctcatgctgcctcccgtaggagt

SEQ ID NO: 995 - DNA, 8 bp, Artificial sequence
  Synthetic
catctgga

SEQ ID NO: 996 - DNA, 48 bp, Artificial sequence
  Synthetic
gcctccctcgcgccatcagcatctggacatgctgcctcccgtaggagt

SEQ ID NO: 997 - DNA, 8 bp, Artificial sequence
  Synthetic
catgacca

SEQ ID NO: 998 - DNA, 48 bp, Artificial sequence
  Synthetic
gcctccctcgcgccatcagcatgaccacatgctgcctcccgtaggagt

SEQ ID NO: 999 - DNA, 8 bp, Artificial sequence
  Synthetic
catgacgt

SEQ ID NO: 1000 - DNA, 48 bp, Artificial sequence
  Synthetic
gcctccctcgcgccatcagcatgacgtcatgctgcctcccgtaggagt

SEQ ID NO: 1001 - DNA, 8 bp, Artificial sequence
  Synthetic
catgagct

SEQ ID NO: 1002 - DNA, 48 bp, Artificial sequence
  Synthetic
gcctccctcgcgccatcagcatgagctcatgctgcctcccgtaggagt

SEQ ID NO: 1003 - DNA, 8 bp, Artificial sequence
  Synthetic
catgagga

SEQ ID NO: 1004 - DNA, 48 bp, Artificial sequence
  Synthetic
gcctccctcgcgccatcagcatgaggacatgctgcctcccgtaggagt

SEQ ID NO: 1005 - DNA, 8 bp, Artificial sequence
  Synthetic
catgcaac

SEQ ID NO: 1006 - DNA, 48 bp, Artificial sequence
  Synthetic
gcctccctcgcgccatcagcatgcaaccatgctgcctcccgtaggagt

SEQ ID NO: 1007 - DNA, 8 bp, Artificial sequence
  Synthetic
catgcatg

SEQ ID NO: 1008 - DNA, 48 bp, Artificial sequence
  Synthetic
gcctccctcgcgccatcagcatgcatgcatgctgcctcccgtaggagt

SEQ ID NO: 1009 - DNA, 8 bp, Artificial sequence
  Synthetic
catgctag

SEQ ID NO: 1010 - DNA, 48 bp, Artificial sequence
  Synthetic
gcctccctcgcgccatcagcatgctagcatgctgcctcccgtaggagt

SEQ ID NO: 1011 - DNA, 8 bp, Artificial sequence
  Synthetic
catgcttc

SEQ ID NO: 1012 - DNA, 48 bp, Artificial sequence
  Synthetic
gcctccctcgcgccatcagcatgcttccatgctgcctcccgtaggagt

SEQ ID NO: 1013 - DNA, 8 bp, Artificial sequence
  Synthetic
catggaag

SEQ ID NO: 1014 - DNA, 48 bp, Artificial sequence
  Synthetic
gcctccctcgcgccatcagcatggaagcatgctgcctcccgtaggagt

SEQ ID NO: 1015 - DNA, 8 bp, Artificial sequence
  Synthetic
catggatc

SEQ ID NO: 1016 - DNA, 48 bp, Artificial sequence
  Synthetic
gcctccctcgcgccatcagcatggatccatgctgcctcccgtaggagt

SEQ ID NO: 1017 - DNA, 8 bp, Artificial sequence
  Synthetic
catggtac

SEQ ID NO: 1018 - DNA, 48 bp, Artificial sequence
  Synthetic
gcctccctcgcgccatcagcatggtaccatgctgcctcccgtaggagt

SEQ ID NO: 1019 - DNA, 8 bp, Artificial sequence
  Synthetic
catggttg

SEQ ID NO: 1020 - DNA, 58 bp, Artificial sequence
  Synthetic
gggggggggggcctccctcgcgccatcagcatggttgcatgctgcctcccgtaggagt

SEQ ID NO: 1021 - DNA, 8 bp, Artificial sequence
  Synthetic
catgtcct

SEQ ID NO: 1022 - DNA, 48 bp, Artificial sequence
  Synthetic
gcctccctcgcgccatcagcatgtcctcatgctgcctcccgtaggagt

SEQ ID NO: 1023 - DNA, 8 bp, Artificial sequence
  Synthetic
catgtcga

SEQ ID NO: 1024 - DNA, 48 bp, Artificial sequence
  Synthetic
gcctccctcgcgccatcagcatgtcgacatgctgcctcccgtaggagt

SEQ ID NO: 1025 - DNA, 8 bp, Artificial sequence
  Synthetic
catgtgca

SEQ ID NO: 1026 - DNA, 48 bp, Artificial sequence
  Synthetic
gcctccctcgcgccatcagcatgtgcacatgctgcctcccgtaggagt

SEQ ID NO: 1027 - DNA, 8 bp, Artificial sequence
  Synthetic
catgtggt

SEQ ID NO: 1028 - DNA, 48 bp, Artificial sequence
  Synthetic
gcctccctcgcgccatcagcatgtggtcatgctgcctcccgtaggagt

SEQ ID NO: 1029 - DNA, 8 bp, Artificial sequence
  Synthetic
ccaaccaa

SEQ ID NO: 1030 - DNA, 48 bp, Artificial sequence
  Synthetic
gcctccctcgcgccatcagccaaccaacatgctgcctcccgtaggagt

SEQ ID NO: 1031 - DNA, 8 bp, Artificial sequence
  Synthetic
ccaacctt

SEQ ID NO: 1032 - DNA, 48 bp, Artificial sequence
  Synthetic
gcctccctcgcgccatcagccaaccttcatgctgcctcccgtaggagt

SEQ ID NO: 1033 - DNA, 8 bp, Artificial sequence
  Synthetic
ccaacgat

SEQ ID NO: 1034 - DNA, 48 bp, Artificial sequence
  Synthetic
gcctccctcgcgccatcagccaacgatcatgctgcctcccgtaggagt

SEQ ID NO: 1035 - DNA, 8 bp, Artificial sequence
  Synthetic
ccaacgta

SEQ ID NO: 1036 - DNA, 48 bp, Artificial sequence
  Synthetic
gcctccctcgcgccatcagccaacgtacatgctgcctcccgtaggagt

SEQ ID NO: 1037 - DNA, 8 bp, Artificial sequence
  Synthetic
ccaagcat

SEQ ID NO: 1038 - DNA, 48 bp, Artificial sequence
  Synthetic
gcctccctcgcgccatcagccaagcatcatgctgcctcccgtaggagt

SEQ ID NO: 1039 - DNA, 8 bp, Artificial sequence
  Synthetic
ccaagcta

SEQ ID NO: 1040 - DNA, 48 bp, Artificial sequence
  Synthetic
gcctccctcgcgccatcagccaagctacatgctgcctcccgtaggagt

SEQ ID NO: 1041 - DNA, 8 bp, Artificial sequence
  Synthetic
ccaaggaa

SEQ ID NO: 1042 - DNA, 48 bp, Artificial sequence
  Synthetic
gcctccctcgcgccatcagccaaggaacatgctgcctcccgtaggagt

SEQ ID NO: 1043 - DNA, 8 bp, Artificial sequence
  Synthetic
ccaaggtt

SEQ ID NO: 1044 - DNA, 48 bp, Artificial sequence
  Synthetic
gcctccctcgcgccatcagccaaggttcatgctgcctcccgtaggagt

SEQ ID NO: 1045 - DNA, 8 bp, Artificial sequence
  Synthetic
ccaatacg

SEQ ID NO: 1046 - DNA, 48 bp, Artificial sequence
  Synthetic
gcctccctcgcgccatcagccaatacgcatgctgcctcccgtaggagt

SEQ ID NO: 1047 - DNA, 8 bp, Artificial sequence
  Synthetic
ccaatagc

SEQ ID NO: 1048 - DNA, 48 bp, Artificial sequence
  Synthetic
gcctccctcgcgccatcagccaatagccatgctgcctcccgtaggagt

SEQ ID NO: 1049 - DNA, 8 bp, Artificial sequence
  Synthetic
ccaattcc

SEQ ID NO: 1050 - DNA, 48 bp, Artificial sequence
  Synthetic
gcctccctcgcgccatcagccaattcccatgctgcctcccgtaggagt

SEQ ID NO: 1051 - DNA, 8 bp, Artificial sequence
  Synthetic
ccaattgg

SEQ ID NO: 1052 - DNA, 48 bp, Artificial sequence
  Synthetic
gcctccctcgcgccatcagccaattggcatgctgcctcccgtaggagt

SEQ ID NO: 1053 - DNA, 8 bp, Artificial sequence
  Synthetic
ccataacg

SEQ ID NO: 1054 - DNA, 48 bp, Artificial sequence
  Synthetic
gcctccctcgcgccatcagccataacgcatgctgcctcccgtaggagt

SEQ ID NO: 1055 - DNA, 8 bp, Artificial sequence
  Synthetic
ccataagc

SEQ ID NO: 1056 - DNA, 48 bp, Artificial sequence
  Synthetic
gcctccctcgcgccatcagccataagccatgctgcctcccgtaggagt

SEQ ID NO: 1057 - DNA, 8 bp, Artificial sequence
  Synthetic
ccatatcc

SEQ ID NO: 1058 - DNA, 48 bp, Artificial sequence
  Synthetic
gcctccctcgcgccatcagccatatcccatgctgcctcccgtaggagt

SEQ ID NO: 1059 - DNA, 8 bp, Artificial sequence
  Synthetic
ccatatgg

SEQ ID NO: 1060 - DNA, 48 bp, Artificial sequence
  Synthetic
gcctccctcgcgccatcagccatatggcatgctgcctcccgtaggagt

SEQ ID NO: 1061 - DNA, 8 bp, Artificial sequence
  Synthetic
ccatccat

SEQ ID NO: 1062 - DNA, 48 bp, Artificial sequence
  Synthetic
gcctccctcgcgccatcagccatccatcatgctgcctcccgtaggagt

SEQ ID NO: 1063 - DNA, 8 bp, Artificial sequence
  Synthetic
ccatccta

SEQ ID NO: 1064 - DNA, 48 bp, Artificial sequence
  Synthetic
gcctccctcgcgccatcagccatcctacatgctgcctcccgtaggagt

SEQ ID NO: 1065 - DNA, 8 bp, Artificial sequence
  Synthetic
ccatcgaa

SEQ ID NO: 1066 - DNA, 48 bp, Artificial sequence
  Synthetic
gcctccctcgcgccatcagccatcgaacatgctgcctcccgtaggagt

SEQ ID NO: 1067 - DNA, 8 bp, Artificial sequence
  Synthetic
ccatcgtt

SEQ ID NO: 1068 - DNA, 48 bp, Artificial sequence
  Synthetic
gcctccctcgcgccatcagccatcgttcatgctgcctcccgtaggagt

SEQ ID NO: 1069 - DNA, 8 bp, Artificial sequence
  Synthetic
ccatgcaa

SEQ ID NO: 1070 - DNA, 48 bp, Artificial sequence
  Synthetic
gcctccctcgcgccatcagccatgcaacatgctgcctcccgtaggagt

SEQ ID NO: 1071 - DNA, 8 bp, Artificial sequence
  Synthetic
ccatgctt

SEQ ID NO: 1072 - DNA, 48 bp, Artificial sequence
  Synthetic
gcctccctcgcgccatcagccatgcttcatgctgcctcccgtaggagt

SEQ ID NO: 1073 - DNA, 8 bp, Artificial sequence
  Synthetic
ccatggat

SEQ ID NO: 1074 - DNA, 48 bp, Artificial sequence
  Synthetic
gcctccctcgcgccatcagccatggatcatgctgcctcccgtaggagt

SEQ ID NO: 1075 - DNA, 8 bp, Artificial sequence
  Synthetic
ccatggta

SEQ ID NO: 1076 - DNA, 48 bp, Artificial sequence
  Synthetic
gcctccctcgcgccatcagccatggtacatgctgcctcccgtaggagt

SEQ ID NO: 1077 - DNA, 8 bp, Artificial sequence
  Synthetic
ccattacc

SEQ ID NO: 1078 - DNA, 48 bp, Artificial sequence
  Synthetic
gcctccctcgcgccatcagccattacccatgctgcctcccgtaggagt

SEQ ID NO: 1079 - DNA, 8 bp, Artificial sequence
  Synthetic
ccattagg

SEQ ID NO: 1080 - DNA, 48 bp, Artificial sequence
  Synthetic
gcctccctcgcgccatcagccattaggcatgctgcctcccgtaggagt

SEQ ID NO: 1081 - DNA, 8 bp, Artificial sequence
  Synthetic
ccgcaata

SEQ ID NO: 1082 - DNA, 48 bp, Artificial sequence
  Synthetic
gcctccctcgcgccatcagccgcaatacatgctgcctcccgtaggagt

SEQ ID NO: 1083 - DNA, 8 bp, Artificial sequence
  Synthetic
ccgcataa

SEQ ID NO: 1084 - DNA, 48 bp, Artificial sequence
  Synthetic
gcctccctcgcgccatcagccgcataacatgctgcctcccgtaggagt

SEQ ID NO: 1085 - DNA, 8 bp, Artificial sequence
  Synthetic
ccgctatt

SEQ ID NO: 1086 - DNA, 48 bp, Artificial sequence
  Synthetic
gcctccctcgcgccatcagccgctattcatgctgcctcccgtaggagt

SEQ ID NO: 1087 - DNA, 8 bp, Artificial sequence
  Synthetic
ccgcttat

SEQ ID NO: 1088 - DNA, 48 bp, Artificial sequence
  Synthetic
gcctccctcgcgccatcagccgcttatcatgctgcctcccgtaggagt

SEQ ID NO: 1089 - DNA, 8 bp, Artificial sequence
  Synthetic
ccggaatt

SEQ ID NO: 1090 - DNA, 48 bp, Artificial sequence
  Synthetic
gcctccctcgcgccatcagccggaattcatgctgcctcccgtaggagt

SEQ ID NO: 1091 - DNA, 8 bp, Artificial sequence
  Synthetic
ccggatat

SEQ ID NO: 1092 - DNA, 48 bp, Artificial sequence
  Synthetic
gcctccctcgcgccatcagccggatatcatgctgcctcccgtaggagt

SEQ ID NO: 1093 - DNA, 8 bp, Artificial sequence
  Synthetic
ccggatta

SEQ ID NO: 1094 - DNA, 48 bp, Artificial sequence
  Synthetic
gcctccctcgcgccatcagccggattacatgctgcctcccgtaggagt

SEQ ID NO: 1095 - DNA, 8 bp, Artificial sequence
  Synthetic
ccggtaat

SEQ ID NO: 1096 - DNA, 48 bp, Artificial sequence
  Synthetic
gcctccctcgcgccatcagccggtaatcatgctgcctcccgtaggagt

SEQ ID NO: 1097 - DNA, 8 bp, Artificial sequence
  Synthetic
ccggtata

SEQ ID NO: 1098 - DNA, 48 bp, Artificial sequence
  Synthetic
gcctccctcgcgccatcagccggtatacatgctgcctcccgtaggagt

SEQ ID NO: 1099 - DNA, 8 bp, Artificial sequence
  Synthetic
ccggttaa

SEQ ID NO: 1100 - DNA, 48 bp, Artificial sequence
  Synthetic
gcctccctcgcgccatcagccggttaacatgctgcctcccgtaggagt

SEQ ID NO: 1101 - DNA, 8 bp, Artificial sequence
  Synthetic
cctaatcc

SEQ ID NO: 1102 - DNA, 48 bp, Artificial sequence
  Synthetic
gcctccctcgcgccatcagcctaatcccatgctgcctcccgtaggagt

SEQ ID NO: 1103 - DNA, 8 bp, Artificial sequence
  Synthetic
cctaatgg

SEQ ID NO: 1104 - DNA, 48 bp, Artificial sequence
  Synthetic
gcctccctcgcgccatcagcctaatggcatgctgcctcccgtaggagt

SEQ ID NO: 1105 - DNA, 8 bp, Artificial sequence
  Synthetic
cctaccat

SEQ ID NO: 1106 - DNA, 48 bp, Artificial sequence
  Synthetic
gcctccctcgcgccatcagcctaccatcatgctgcctcccgtaggagt

SEQ ID NO: 1107 - DNA, 8 bp, Artificial sequence
  Synthetic
cctaccta

SEQ ID NO: 1108 - DNA, 48 bp, Artificial sequence
  Synthetic
gcctccctcgcgccatcagcctacctacatgctgcctcccgtaggagt

SEQ ID NO: 1109 - DNA, 8 bp, Artificial sequence
  Synthetic
cctacgaa

SEQ ID NO: 1110 - DNA, 48 bp, Artificial sequence
  Synthetic
gcctccctcgcgccatcagcctacgaacatgctgcctcccgtaggagt

SEQ ID NO: 1111 - DNA, 8 bp, Artificial sequence
  Synthetic
cctacgtt

SEQ ID NO: 1112 - DNA, 48 bp, Artificial sequence
  Synthetic
gcctccctcgcgccatcagcctacgttcatgctgcctcccgtaggagt

SEQ ID NO: 1113 - DNA, 8 bp, Artificial sequence
  Synthetic
cctagcaa

SEQ ID NO: 1114 - DNA, 48 bp, Artificial sequence
  Synthetic
gcctccctcgcgccatcagcctagcaacatgctgcctcccgtaggagt

SEQ ID NO: 1115 - DNA, 8 bp, Artificial sequence
  Synthetic
cctagctt

SEQ ID NO: 1116 - DNA, 48 bp, Artificial sequence
  Synthetic
gcctccctcgcgccatcagcctagcttcatgctgcctcccgtaggagt

SEQ ID NO: 1117 - DNA, 8 bp, Artificial sequence
  Synthetic
cctaggat

SEQ ID NO: 1118 - DNA, 48 bp, Artificial sequence
  Synthetic
gcctccctcgcgccatcagcctaggatcatgctgcctcccgtaggagt

SEQ ID NO: 1119 - DNA, 8 bp, Artificial sequence
  Synthetic
cctaggta

SEQ ID NO: 1120 - DNA, 48 bp, Artificial sequence
  Synthetic
gcctccctcgcgccatcagcctaggtacatgctgcctcccgtaggagt

SEQ ID NO: 1121 - DNA, 8 bp, Artificial sequence
  Synthetic
cctatacc

SEQ ID NO: 1122 - DNA, 48 bp, Artificial sequence
  Synthetic
gcctccctcgcgccatcagcctatacccatgctgcctcccgtaggagt

SEQ ID NO: 1123 - DNA, 8 bp, Artificial sequence
  Synthetic
cctatagg

SEQ ID NO: 1124 - DNA, 48 bp, Artificial sequence
  Synthetic
gcctccctcgcgccatcagcctataggcatgctgcctcccgtaggagt

SEQ ID NO: 1125 - DNA, 8 bp, Artificial sequence
  Synthetic
cctattcg

SEQ ID NO: 1126 - DNA, 48 bp, Artificial sequence
  Synthetic
gcctccctcgcgccatcagcctattcgcatgctgcctcccgtaggagt

SEQ ID NO: 1127 - DNA, 8 bp, Artificial sequence
  Synthetic
cctattgc

SEQ ID NO: 1128 - DNA, 48 bp, Artificial sequence
  Synthetic
gcctccctcgcgccatcagcctattgccatgctgcctcccgtaggagt

SEQ ID NO: 1129 - DNA, 8 bp, Artificial sequence
  Synthetic
ccttaacc

SEQ ID NO: 1130 - DNA, 48 bp, Artificial sequence
  Synthetic
gcctccctcgcgccatcagccttaacccatgctgcctcccgtaggagt

SEQ ID NO: 1131 - DNA, 8 bp, Artificial sequence
  Synthetic
ccttaagg

SEQ ID NO: 1132 - DNA, 48 bp, Artificial sequence
  Synthetic
gcctccctcgcgccatcagccttaaggcatgctgcctcccgtaggagt

SEQ ID NO: 1133 - DNA, 8 bp, Artificial sequence
  Synthetic
ccttatcg

SEQ ID NO: 1134 - DNA, 48 bp, Artificial sequence
  Synthetic
gcctccctcgcgccatcagccttatcgcatgctgcctcccgtaggagt

SEQ ID NO: 1135 - DNA, 8 bp, Artificial sequence
  Synthetic
ccttatgc

SEQ ID NO: 1136 - DNA, 48 bp, Artificial sequence
  Synthetic
gcctccctcgcgccatcagccttatgccatgctgcctcccgtaggagt

SEQ ID NO: 1137 - DNA, 8 bp, Artificial sequence
  Synthetic
ccttccaa

SEQ ID NO: 1138 - DNA, 48 bp, Artificial sequence
  Synthetic
gcctccctcgcgccatcagccttccaacatgctgcctcccgtaggagt

SEQ ID NO: 1139 - DNA, 8 bp, Artificial sequence
  Synthetic
ccttcctt

SEQ ID NO: 1140 - DNA, 48 bp, Artificial sequence
  Synthetic
gcctccctcgcgccatcagccttccttcatgctgcctcccgtaggagt

SEQ ID NO: 1141 - DNA, 8 bp, Artificial sequence
  Synthetic
ccttcgat

SEQ ID NO: 1142 - DNA, 48 bp, Artificial sequence
  Synthetic
gcctccctcgcgccatcagccttcgatcatgctgcctcccgtaggagt

SEQ ID NO: 1143 - DNA, 8 bp, Artificial sequence
  Synthetic
ccttcgta

SEQ ID NO: 1144 - DNA, 48 bp, Artificial sequence
  Synthetic
gcctccctcgcgccatcagccttcgtacatgctgcctcccgtaggagt

SEQ ID NO: 1145 - DNA, 8 bp, Artificial sequence
  Synthetic
ccttgcat

SEQ ID NO: 1146 - DNA, 48 bp, Artificial sequence
  Synthetic
gcctccctcgcgccatcagccttgcatcatgctgcctcccgtaggagt

SEQ ID NO: 1147 - DNA, 8 bp, Artificial sequence
  Synthetic
ccttgcta

SEQ ID NO: 1148 - DNA, 48 bp, Artificial sequence
  Synthetic
gcctccctcgcgccatcagccttgctacatgctgcctcccgtaggagt

SEQ ID NO: 1149 - DNA, 8 bp, Artificial sequence
  Synthetic
ccttggaa

SEQ ID NO: 1150 - DNA, 48 bp, Artificial sequence
  Synthetic
gcctccctcgcgccatcagccttggaacatgctgcctcccgtaggagt

SEQ ID NO: 1151 - DNA, 8 bp, Artificial sequence
  Synthetic
ccttggtt

SEQ ID NO: 1152 - DNA, 48 bp, Artificial sequence
  Synthetic
gcctccctcgcgccatcagccttggttcatgctgcctcccgtaggagt

SEQ ID NO: 1153 - DNA, 8 bp, Artificial sequence
  Synthetic
cgaaccat

SEQ ID NO: 1154 - DNA, 48 bp, Artificial sequence
  Synthetic
gcctccctcgcgccatcagcgaaccatcatgctgcctcccgtaggagt

SEQ ID NO: 1155 - DNA, 8 bp, Artificial sequence
  Synthetic
cgaaccta

SEQ ID NO: 1156 - DNA, 48 bp, Artificial sequence
  Synthetic
gcctccctcgcgccatcagcgaacctacatgctgcctcccgtaggagt

SEQ ID NO: 1157 - DNA, 8 bp, Artificial sequence
  Synthetic
cgaacgaa

SEQ ID NO: 1158 - DNA, 48 bp, Artificial sequence
  Synthetic
gcctccctcgcgccatcagcgaacgaacatgctgcctcccgtaggagt

SEQ ID NO: 1159 - DNA, 8 bp, Artificial sequence
  Synthetic
cgaacgtt

SEQ ID NO: 1160 - DNA, 48 bp, Artificial sequence
  Synthetic
gcctccctcgcgccatcagcgaacgttcatgctgcctcccgtaggagt

SEQ ID NO: 1161 - DNA, 8 bp, Artificial sequence
  Synthetic
cgaagcaa

SEQ ID NO: 1162 - DNA, 48 bp, Artificial sequence
  Synthetic
gcctccctcgcgccatcagcgaagcaacatgctgcctcccgtaggagt

SEQ ID NO: 1163 - DNA, 8 bp, Artificial sequence
  Synthetic
cgaagctt

SEQ ID NO: 1164 - DNA, 48 bp, Artificial sequence
  Synthetic
gcctccctcgcgccatcagcgaagcttcatgctgcctcccgtaggagt

SEQ ID NO: 1165 - DNA, 8 bp, Artificial sequence
  Synthetic
cgaaggat

SEQ ID NO: 1166 - DNA, 48 bp, Artificial sequence
  Synthetic
gcctccctcgcgccatcagcgaaggatcatgctgcctcccgtaggagt

SEQ ID NO: 1167 - DNA, 8 bp, Artificial sequence
  Synthetic
cgaaggta

SEQ ID NO: 1168 - DNA, 48 bp, Artificial sequence
  Synthetic
gcctccctcgcgccatcagcgaaggtacatgctgcctcccgtaggagt

SEQ ID NO: 1169 - DNA, 8 bp, Artificial sequence
  Synthetic
cgaatacc

SEQ ID NO: 1170 - DNA, 48 bp, Artificial sequence
  Synthetic
gcctccctcgcgccatcagcgaatacccatgctgcctcccgtaggagt

SEQ ID NO: 1171 - DNA, 8 bp, Artificial sequence
  Synthetic
cgaatagg

SEQ ID NO: 1172 - DNA, 48 bp, Artificial sequence
  Synthetic
gcctccctcgcgccatcagcgaataggcatgctgcctcccgtaggagt

SEQ ID NO: 1173 - DNA, 8 bp, Artificial sequence
  Synthetic
cgaattcg

SEQ ID NO: 1174 - DNA, 48 bp, Artificial sequence
  Synthetic
gcctccctcgcgccatcagcgaattcgcatgctgcctcccgtaggagt

SEQ ID NO: 1175 - DNA, 8 bp, Artificial sequence
  Synthetic
cgaattgc

SEQ ID NO: 1176 - DNA, 48 bp, Artificial sequence
  Synthetic
gcctccctcgcgccatcagcgaattgccatgctgcctcccgtaggagt

SEQ ID NO: 1177 - DNA, 8 bp, Artificial sequence
  Synthetic
cgataacc

SEQ ID NO: 1178 - DNA, 48 bp, Artificial sequence
  Synthetic
gcctccctcgcgccatcagcgataacccatgctgcctcccgtaggagt

SEQ ID NO: 1179 - DNA, 8 bp, Artificial sequence
  Synthetic
cgataagg

SEQ ID NO: 1180 - DNA, 48 bp, Artificial sequence
  Synthetic
gcctccctcgcgccatcagcgataaggcatgctgcctcccgtaggagt

SEQ ID NO: 1181 - DNA, 8 bp, Artificial sequence
  Synthetic
cgatatcg

SEQ ID NO: 1182 - DNA, 48 bp, Artificial sequence
  Synthetic
gcctccctcgcgccatcagcgatatcgcatgctgcctcccgtaggagt

SEQ ID NO: 1183 - DNA, 8 bp, Artificial sequence
  Synthetic
cgatatgc

SEQ ID NO: 1184 - DNA, 48 bp, Artificial sequence
  Synthetic
gcctccctcgcgccatcagcgatatgccatgctgcctcccgtaggagt

SEQ ID NO: 1185 - DNA, 8 bp, Artificial sequence
  Synthetic
cgatccaa

SEQ ID NO: 1186 - DNA, 48 bp, Artificial sequence
  Synthetic
gcctccctcgcgccatcagcgatccaacatgctgcctcccgtaggagt

SEQ ID NO: 1187 - DNA, 8 bp, Artificial sequence
  Synthetic
cgatcctt

SEQ ID NO: 1188 - DNA, 48 bp, Artificial sequence
  Synthetic
gcctccctcgcgccatcagcgatccttcatgctgcctcccgtaggagt

SEQ ID NO: 1189 - DNA, 8 bp, Artificial sequence
  Synthetic
cgatcgat

SEQ ID NO: 1190 - DNA, 48 bp, Artificial sequence
  Synthetic
gcctccctcgcgccatcagcgatcgatcatgctgcctcccgtaggagt

SEQ ID NO: 1191 - DNA, 8 bp, Artificial sequence
  Synthetic
cgatcgta

SEQ ID NO: 1192 - DNA, 48 bp, Artificial sequence
  Synthetic
gcctccctcgcgccatcagcgatcgtacatgctgcctcccgtaggagt

SEQ ID NO: 1193 - DNA, 8 bp, Artificial sequence
  Synthetic
cgatgcat

SEQ ID NO: 1194 - DNA, 48 bp, Artificial sequence
  Synthetic
gcctccctcgcgccatcagcgatgcatcatgctgcctcccgtaggagt

SEQ ID NO: 1195 - DNA, 8 bp, Artificial sequence
  Synthetic
cgatgcta

SEQ ID NO: 1196 - DNA, 48 bp, Artificial sequence
  Synthetic
gcctccctcgcgccatcagcgatgctacatgctgcctcccgtaggagt

SEQ ID NO: 1197 - DNA, 8 bp, Artificial sequence
  Synthetic
cgatggaa

SEQ ID NO: 1198 - DNA, 48 bp, Artificial sequence
  Synthetic
gcctccctcgcgccatcagcgatggaacatgctgcctcccgtaggagt

SEQ ID NO: 1199 - DNA, 8 bp, Artificial sequence
  Synthetic
cgatggtt

SEQ ID NO: 1200 - DNA, 48 bp, Artificial sequence
  Synthetic
gcctccctcgcgccatcagcgatggttcatgctgcctcccgtaggagt

SEQ ID NO: 1201 - DNA, 8 bp, Artificial sequence
  Synthetic
cgattacg

SEQ ID NO: 1202 - DNA, 48 bp, Artificial sequence
  Synthetic
gcctccctcgcgccatcagcgattacgcatgctgcctcccgtaggagt

SEQ ID NO: 1203 - DNA, 8 bp, Artificial sequence
  Synthetic
cgattagc

SEQ ID NO: 1204 - DNA, 48 bp, Artificial sequence
  Synthetic
gcctccctcgcgccatcagcgattagccatgctgcctcccgtaggagt

SEQ ID NO: 1205 - DNA, 8 bp, Artificial sequence
  Synthetic
cgccaata

SEQ ID NO: 1206 - DNA, 48 bp, Artificial sequence
  Synthetic
gcctccctcgcgccatcagcgccaatacatgctgcctcccgtaggagt

SEQ ID NO: 1207 - DNA, 8 bp, Artificial sequence
  Synthetic
cgccataa

SEQ ID NO: 1208 - DNA, 48 bp, Artificial sequence
  Synthetic
gcctccctcgcgccatcagcgccataacatgctgcctcccgtaggagt

SEQ ID NO: 1209 - DNA, 8 bp, Artificial sequence
  Synthetic
cgcctatt

SEQ ID NO: 1210 - DNA, 48 bp, Artificial sequence
  Synthetic
gcctccctcgcgccatcagcgcctattcatgctgcctcccgtaggagt

SEQ ID NO: 1211 - DNA, 8 bp, Artificial sequence
  Synthetic
cgccttat

SEQ ID NO: 1212 - DNA, 48 bp, Artificial sequence
  Synthetic
gcctccctcgcgccatcagcgccttatcatgctgcctcccgtaggagt

SEQ ID NO: 1213 - DNA, 8 bp, Artificial sequence
  Synthetic
cgcgaatt

SEQ ID NO: 1214 - DNA, 48 bp, Artificial sequence
  Synthetic
gcctccctcgcgccatcagcgcgaattcatgctgcctcccgtaggagt

SEQ ID NO: 1215 - DNA, 8 bp, Artificial sequence
  Synthetic
cgcgatat

SEQ ID NO: 1216 - DNA, 48 bp, Artificial sequence
  Synthetic
gcctccctcgcgccatcagcgcgatatcatgctgcctcccgtaggagt

SEQ ID NO: 1217 - DNA, 8 bp, Artificial sequence
  Synthetic
cgcgatta

SEQ ID NO: 1218 - DNA, 48 bp, Artificial sequence
  Synthetic
gcctccctcgcgccatcagcgcgattacatgctgcctcccgtaggagt

SEQ ID NO: 1219 - DNA, 8 bp, Artificial sequence
  Synthetic
cgcgtaat

SEQ ID NO: 1220 - DNA, 48 bp, Artificial sequence
  Synthetic
gcctccctcgcgccatcagcgcgtaatcatgctgcctcccgtaggagt

SEQ ID NO: 1221 - DNA, 8 bp, Artificial sequence
  Synthetic
cgcgtata

SEQ ID NO: 1222 - DNA, 48 bp, Artificial sequence
  Synthetic
gcctccctcgcgccatcagcgcgtatacatgctgcctcccgtaggagt

SEQ ID NO: 1223 - DNA, 8 bp, Artificial sequence
  Synthetic
cgcgttaa

SEQ ID NO: 1224 - DNA, 48 bp, Artificial sequence
  Synthetic
gcctccctcgcgccatcagcgcgttaacatgctgcctcccgtaggagt

SEQ ID NO: 1225 - DNA, 8 bp, Artificial sequence
  Synthetic
cggcaatt

SEQ ID NO: 1226 - DNA, 48 bp, Artificial sequence
  Synthetic
gcctccctcgcgccatcagcggcaattcatgctgcctcccgtaggagt

SEQ ID NO: 1227 - DNA, 8 bp, Artificial sequence
  Synthetic
cggcatat

SEQ ID NO: 1228 - DNA, 48 bp, Artificial sequence
  Synthetic
gcctccctcgcgccatcagcggcatatcatgctgcctcccgtaggagt

SEQ ID NO: 1229 - DNA, 8 bp, Artificial sequence
  Synthetic
cggcatta

SEQ ID NO: 1230 - DNA, 48 bp, Artificial sequence
  Synthetic
gcctccctcgcgccatcagcggcattacatgctgcctcccgtaggagt

SEQ ID NO: 1231 - DNA, 8 bp, Artificial sequence
  Synthetic
cggctaat

SEQ ID NO: 1232 - DNA, 48 bp, Artificial sequence
  Synthetic
gcctccctcgcgccatcagcggctaatcatgctgcctcccgtaggagt

SEQ ID NO: 1233 - DNA, 8 bp, Artificial sequence
  Synthetic
cggctata

SEQ ID NO: 1234 - DNA, 48 bp, Artificial sequence
  Synthetic
gcctccctcgcgccatcagcggctatacatgctgcctcccgtaggagt

SEQ ID NO: 1235 - DNA, 8 bp, Artificial sequence
  Synthetic
cggcttaa

SEQ ID NO: 1236 - DNA, 48 bp, Artificial sequence
  Synthetic
gcctccctcgcgccatcagcggcttaacatgctgcctcccgtaggagt

SEQ ID NO: 1237 - DNA, 8 bp, Artificial sequence
  Synthetic
cgtaatcg

SEQ ID NO: 1238 - DNA, 48 bp, Artificial sequence
  Synthetic
gcctccctcgcgccatcagcgtaatcgcatgctgcctcccgtaggagt

SEQ ID NO: 1239 - DNA, 8 bp, Artificial sequence
  Synthetic
cgtaatgc

SEQ ID NO: 1240 - DNA, 48 bp, Artificial sequence
  Synthetic
gcctccctcgcgccatcagcgtaatgccatgctgcctcccgtaggagt

SEQ ID NO: 1241 - DNA, 8 bp, Artificial sequence
  Synthetic
cgtaccaa

SEQ ID NO: 1242 - DNA, 48 bp, Artificial sequence
  Synthetic
gcctccctcgcgccatcagcgtaccaacatgctgcctcccgtaggagt

SEQ ID NO: 1243 - DNA, 8 bp, Artificial sequence
  Synthetic
cgtacctt

SEQ ID NO: 1244 - DNA, 48 bp, Artificial sequence
  Synthetic
gcctccctcgcgccatcagcgtaccttcatgctgcctcccgtaggagt

SEQ ID NO: 1245 - DNA, 8 bp, Artificial sequence
  Synthetic
cgtacgat

SEQ ID NO: 1246 - DNA, 48 bp, Artificial sequence
  Synthetic
gcctccctcgcgccatcagcgtacgatcatgctgcctcccgtaggagt

SEQ ID NO: 1247 - DNA, 8 bp, Artificial sequence
  Synthetic
cgtacgta

SEQ ID NO: 1248 - DNA, 48 bp, Artificial sequence
  Synthetic
gcctccctcgcgccatcagcgtacgtacatgctgcctcccgtaggagt

SEQ ID NO: 1249 - DNA, 8 bp, Artificial sequence
  Synthetic
cgtagcat

SEQ ID NO: 1250 - DNA, 48 bp, Artificial sequence
  Synthetic
gcctccctcgcgccatcagcgtagcatcatgctgcctcccgtaggagt

SEQ ID NO: 1251 - DNA, 8 bp, Artificial sequence
  Synthetic
cgtagcta

SEQ ID NO: 1252 - DNA, 48 bp, Artificial sequence
  Synthetic
gcctccctcgcgccatcagcgtagctacatgctgcctcccgtaggagt

SEQ ID NO: 1253 - DNA, 8 bp, Artificial sequence
  Synthetic
cgtaggaa

SEQ ID NO: 1254 - DNA, 48 bp, Artificial sequence
  Synthetic
gcctccctcgcgccatcagcgtaggaacatgctgcctcccgtaggagt

SEQ ID NO: 1255 - DNA, 8 bp, Artificial sequence
  Synthetic
cgtaggtt

SEQ ID NO: 1256 - DNA, 48 bp, Artificial sequence
  Synthetic
gcctccctcgcgccatcagcgtaggttcatgctgcctcccgtaggagt

SEQ ID NO: 1257 - DNA, 8 bp, Artificial sequence
  Synthetic
cgtatacg

SEQ ID NO: 1258 - DNA, 48 bp, Artificial sequence
  Synthetic
gcctccctcgcgccatcagcgtatacgcatgctgcctcccgtaggagt

SEQ ID NO: 1259 - DNA, 8 bp, Artificial sequence
  Synthetic
cgtatagc

SEQ ID NO: 1260 - DNA, 48 bp, Artificial sequence
  Synthetic
gcctccctcgcgccatcagcgtatagccatgctgcctcccgtaggagt

SEQ ID NO: 1261 - DNA, 8 bp, Artificial sequence
  Synthetic
cgtattcc

SEQ ID NO: 1262 - DNA, 48 bp, Artificial sequence
  Synthetic
gcctccctcgcgccatcagcgtattcccatgctgcctcccgtaggagt

SEQ ID NO: 1263 - DNA, 8 bp, Artificial sequence
  Synthetic
cgtattgg

SEQ ID NO: 1264 - DNA, 48 bp, Artificial sequence
  Synthetic
gcctccctcgcgccatcagcgtattggcatgctgcctcccgtaggagt

SEQ ID NO: 1265 - DNA, 8 bp, Artificial sequence
  Synthetic
cgttaacg

SEQ ID NO: 1266 - DNA, 48 bp, Artificial sequence
  Synthetic
gcctccctcgcgccatcagcgttaacgcatgctgcctcccgtaggagt

SEQ ID NO: 1267 - DNA, 8 bp, Artificial sequence
  Synthetic
cgttaagc

SEQ ID NO: 1268 - DNA, 48 bp, Artificial sequence
  Synthetic
gcctccctcgcgccatcagcgttaagccatgctgcctcccgtaggagt

SEQ ID NO: 1269 - DNA, 8 bp, Artificial sequence
  Synthetic
cgttatcc

SEQ ID NO: 1270 - DNA, 48 bp, Artificial sequence
  Synthetic
gcctccctcgcgccatcagcgttatcccatgctgcctcccgtaggagt

SEQ ID NO: 1271 - DNA, 8 bp, Artificial sequence
  Synthetic
cgttatgg

SEQ ID NO: 1272 - DNA, 48 bp, Artificial sequence
  Synthetic
gcctccctcgcgccatcagcgttatggcatgctgcctcccgtaggagt

SEQ ID NO: 1273 - DNA, 8 bp, Artificial sequence
  Synthetic
cgttccat

SEQ ID NO: 1274 - DNA, 48 bp, Artificial sequence
  Synthetic
gcctccctcgcgccatcagcgttccatcatgctgcctcccgtaggagt

SEQ ID NO: 1275 - DNA, 8 bp, Artificial sequence
  Synthetic
cgttccta

SEQ ID NO: 1276 - DNA, 48 bp, Artificial sequence
  Synthetic
gcctccctcgcgccatcagcgttcctacatgctgcctcccgtaggagt

SEQ ID NO: 1277 - DNA, 8 bp, Artificial sequence
  Synthetic
cgttcgaa

SEQ ID NO: 1278 - DNA, 48 bp, Artificial sequence
  Synthetic
gcctccctcgcgccatcagcgttcgaacatgctgcctcccgtaggagt

SEQ ID NO: 1279 - DNA, 8 bp, Artificial sequence
  Synthetic
cgttcgtt

SEQ ID NO: 1280 - DNA, 48 bp, Artificial sequence
  Synthetic
gcctccctcgcgccatcagcgttcgttcatgctgcctcccgtaggagt

SEQ ID NO: 1281 - DNA, 8 bp, Artificial sequence
  Synthetic
cgttgcaa

SEQ ID NO: 1282 - DNA, 48 bp, Artificial sequence
  Synthetic
gcctccctcgcgccatcagcgttgcaacatgctgcctcccgtaggagt

SEQ ID NO: 1283 - DNA, 8 bp, Artificial sequence
  Synthetic
cgttgctt

SEQ ID NO: 1284 - DNA, 48 bp, Artificial sequence
  Synthetic
gcctccctcgcgccatcagcgttgcttcatgctgcctcccgtaggagt

SEQ ID NO: 1285 - DNA, 8 bp, Artificial sequence
  Synthetic
cgttggat

SEQ ID NO: 1286 - DNA, 48 bp, Artificial sequence
  Synthetic
gcctccctcgcgccatcagcgttggatcatgctgcctcccgtaggagt

SEQ ID NO: 1287 - DNA, 8 bp, Artificial sequence
  Synthetic
cgttggta

SEQ ID NO: 1288 - DNA, 48 bp, Artificial sequence
  Synthetic
gcctccctcgcgccatcagcgttggtacatgctgcctcccgtaggagt

SEQ ID NO: 1289 - DNA, 8 bp, Artificial sequence
  Synthetic
ctacacct

SEQ ID NO: 1290 - DNA, 48 bp, Artificial sequence
  Synthetic
gcctccctcgcgccatcagctacacctcatgctgcctcccgtaggagt

SEQ ID NO: 1291 - DNA, 8 bp, Artificial sequence
  Synthetic
ctacacga

SEQ ID NO: 1292 - DNA, 48 bp, Artificial sequence
  Synthetic
gcctccctcgcgccatcagctacacgacatgctgcctcccgtaggagt

SEQ ID NO: 1293 - DNA, 8 bp, Artificial sequence
  Synthetic
ctacagca

SEQ ID NO: 1294 - DNA, 48 bp, Artificial sequence
  Synthetic
gcctccctcgcgccatcagctacagcacatgctgcctcccgtaggagt

SEQ ID NO: 1295 - DNA, 8 bp, Artificial sequence
  Synthetic
ctacaggt

SEQ ID NO: 1296 - DNA, 48 bp, Artificial sequence
  Synthetic
gcctccctcgcgccatcagctacaggtcatgctgcctcccgtaggagt

SEQ ID NO: 1297 - DNA, 8 bp, Artificial sequence
  Synthetic
ctaccaag

SEQ ID NO: 1298 - DNA, 48 bp, Artificial sequence
  Synthetic
gcctccctcgcgccatcagctaccaagcatgctgcctcccgtaggagt

SEQ ID NO: 1299 - DNA, 8 bp, Artificial sequence
  Synthetic
ctaccatc

SEQ ID NO: 1300 - DNA, 48 bp, Artificial sequence
  Synthetic
gcctccctcgcgccatcagctaccatccatgctgcctcccgtaggagt

SEQ ID NO: 1301 - DNA, 8 bp, Artificial sequence
  Synthetic
ctacctac

SEQ ID NO: 1302 - DNA, 48 bp, Artificial sequence
  Synthetic
gcctccctcgcgccatcagctacctaccatgctgcctcccgtaggagt

SEQ ID NO: 1303 - DNA, 8 bp, Artificial sequence
  Synthetic
ctaccttg

SEQ ID NO: 1304 - DNA, 48 bp, Artificial sequence
  Synthetic
gcctccctcgcgccatcagctaccttgcatgctgcctcccgtaggagt

SEQ ID NO: 1305 - DNA, 8 bp, Artificial sequence
  Synthetic
ctacgaac

SEQ ID NO: 1306 - DNA, 48 bp, Artificial sequence
  Synthetic
gcctccctcgcgccatcagctacgaaccatgctgcctcccgtaggagt

SEQ ID NO: 1307 - DNA, 8 bp, Artificial sequence
  Synthetic
ctacgatg

SEQ ID NO: 1308 - DNA, 48 bp, Artificial sequence
  Synthetic
gcctccctcgcgccatcagctacgatgcatgctgcctcccgtaggagt

SEQ ID NO: 1309 - DNA, 8 bp, Artificial sequence
  Synthetic
ctacgtag

SEQ ID NO: 1310 - DNA, 48 bp, Artificial sequence
  Synthetic
gcctccctcgcgccatcagctacgtagcatgctgcctcccgtaggagt

SEQ ID NO: 1311 - DNA, 8 bp, Artificial sequence
  Synthetic
ctacgttc

SEQ ID NO: 1312 - DNA, 48 bp, Artificial sequence
  Synthetic
gcctccctcgcgccatcagctacgttccatgctgcctcccgtaggagt

SEQ ID NO: 1313 - DNA, 8 bp, Artificial sequence
  Synthetic
ctactcca

SEQ ID NO: 1314 - DNA, 48 bp, Artificial sequence
  Synthetic
gcctccctcgcgccatcagctactccacatgctgcctcccgtaggagt

SEQ ID NO: 1315 - DNA, 8 bp, Artificial sequence
  Synthetic
ctactcgt

SEQ ID NO: 1316 - DNA, 48 bp, Artificial sequence
  Synthetic
gcctccctcgcgccatcagctactcgtcatgctgcctcccgtaggagt

SEQ ID NO: 1317 - DNA, 8 bp, Artificial sequence
  Synthetic
ctactgct

SEQ ID NO: 1318 - DNA, 48 bp, Artificial sequence
  Synthetic
gcctccctcgcgccatcagctactgctcatgctgcctcccgtaggagt

SEQ ID NO: 1319 - DNA, 8 bp, Artificial sequence
  Synthetic
ctactgga

SEQ ID NO: 1320 - DNA, 48 bp, Artificial sequence
  Synthetic
gcctccctcgcgccatcagctactggacatgctgcctcccgtaggagt

SEQ ID NO: 1321 - DNA, 8 bp, Artificial sequence
  Synthetic
ctagacca

SEQ ID NO: 1322 - DNA, 48 bp, Artificial sequence
  Synthetic
gcctccctcgcgccatcagctagaccacatgctgcctcccgtaggagt

SEQ ID NO: 1323 - DNA, 8 bp, Artificial sequence
  Synthetic
ctagacgt

SEQ ID NO: 1324 - DNA, 48 bp, Artificial sequence
  Synthetic
gcctccctcgcgccatcagctagacgtcatgctgcctcccgtaggagt

SEQ ID NO: 1325 - DNA, 8 bp, Artificial sequence
  Synthetic
ctagagct

SEQ ID NO: 1326 - DNA, 48 bp, Artificial sequence
  Synthetic
gcctccctcgcgccatcagctagagctcatgctgcctcccgtaggagt

SEQ ID NO: 1327 - DNA, 8 bp, Artificial sequence
  Synthetic
ctagagga

SEQ ID NO: 1328 - DNA, 48 bp, Artificial sequence
  Synthetic
gcctccctcgcgccatcagctagaggacatgctgcctcccgtaggagt

SEQ ID NO: 1329 - DNA, 8 bp, Artificial sequence
  Synthetic
ctagcaac

SEQ ID NO: 1330 - DNA, 48 bp, Artificial sequence
  Synthetic
gcctccctcgcgccatcagctagcaaccatgctgcctcccgtaggagt

SEQ ID NO: 1331 - DNA, 8 bp, Artificial sequence
  Synthetic
ctagcatg

SEQ ID NO: 1332 - DNA, 48 bp, Artificial sequence
  Synthetic
gcctccctcgcgccatcagctagcatgcatgctgcctcccgtaggagt

SEQ ID NO: 1333 - DNA, 8 bp, Artificial sequence
  Synthetic
ctagctag

SEQ ID NO: 1334 - DNA, 48 bp, Artificial sequence
  Synthetic
gcctccctcgcgccatcagctagctagcatgctgcctcccgtaggagt

SEQ ID NO: 1335 - DNA, 8 bp, Artificial sequence
  Synthetic
ctagcttc

SEQ ID NO: 1336 - DNA, 48 bp, Artificial sequence
  Synthetic
gcctccctcgcgccatcagctagcttccatgctgcctcccgtaggagt

SEQ ID NO: 1337 - DNA, 8 bp, Artificial sequence
  Synthetic
ctaggaag

SEQ ID NO: 1338 - DNA, 48 bp, Artificial sequence
  Synthetic
gcctccctcgcgccatcagctaggaagcatgctgcctcccgtaggagt

SEQ ID NO: 1339 - DNA, 8 bp, Artificial sequence
  Synthetic
ctaggatc

SEQ ID NO: 1340 - DNA, 48 bp, Artificial sequence
  Synthetic
gcctccctcgcgccatcagctaggatccatgctgcctcccgtaggagt

SEQ ID NO: 1341 - DNA, 8 bp, Artificial sequence
  Synthetic
ctaggtac

SEQ ID NO: 1342 - DNA, 48 bp, Artificial sequence
  Synthetic
gcctccctcgcgccatcagctaggtaccatgctgcctcccgtaggagt

SEQ ID NO: 1343 - DNA, 8 bp, Artificial sequence
  Synthetic
ctaggttg

SEQ ID NO: 1344 - DNA, 48 bp, Artificial sequence
  Synthetic
gcctccctcgcgccatcagctaggttgcatgctgcctcccgtaggagt

SEQ ID NO: 1345 - DNA, 8 bp, Artificial sequence
  Synthetic
ctagtcct

SEQ ID NO: 1346 - DNA, 48 bp, Artificial sequence
  Synthetic
gcctccctcgcgccatcagctagtcctcatgctgcctcccgtaggagt

SEQ ID NO: 1347 - DNA, 8 bp, Artificial sequence
  Synthetic
ctagtcga

SEQ ID NO: 1348 - DNA, 48 bp, Artificial sequence
  Synthetic
gcctccctcgcgccatcagctagtcgacatgctgcctcccgtaggagt

SEQ ID NO: 1349 - DNA, 8 bp, Artificial sequence
  Synthetic
ctagtgca

SEQ ID NO: 1350 - DNA, 48 bp, Artificial sequence
  Synthetic
gcctccctcgcgccatcagctagtgcacatgctgcctcccgtaggagt

SEQ ID NO: 1351 - DNA, 8 bp, Artificial sequence
  Synthetic
ctagtggt

SEQ ID NO: 1352 - DNA, 48 bp, Artificial sequence
  Synthetic
gcctccctcgcgccatcagctagtggtcatgctgcctcccgtaggagt

SEQ ID NO: 1353 - DNA, 8 bp, Artificial sequence
  Synthetic
ctcaacag

SEQ ID NO: 1354 - DNA, 48 bp, Artificial sequence
  Synthetic
gcctccctcgcgccatcagctcaacagcatgctgcctcccgtaggagt

SEQ ID NO: 1355 - DNA, 8 bp, Artificial sequence
  Synthetic
ctcaactc

SEQ ID NO: 1356 - DNA, 48 bp, Artificial sequence
  Synthetic
gcctccctcgcgccatcagctcaactccatgctgcctcccgtaggagt

SEQ ID NO: 1357 - DNA, 8 bp, Artificial sequence
  Synthetic
ctcaagac

SEQ ID NO: 1358 - DNA, 48 bp, Artificial sequence
  Synthetic
gcctccctcgcgccatcagctcaagaccatgctgcctcccgtaggagt

SEQ ID NO: 1359 - DNA, 8 bp, Artificial sequence
  Synthetic
ctcaagtg

SEQ ID NO: 1360 - DNA, 48 bp, Artificial sequence
  Synthetic
gcctccctcgcgccatcagctcaagtgcatgctgcctcccgtaggagt

SEQ ID NO: 1361 - DNA, 8 bp, Artificial sequence
  Synthetic
ctcacact

SEQ ID NO: 1362 - DNA, 48 bp, Artificial sequence
  Synthetic
gcctccctcgcgccatcagctcacactcatgctgcctcccgtaggagt

SEQ ID NO: 1363 - DNA, 8 bp, Artificial sequence
  Synthetic
ctcacaga

SEQ ID NO: 1364 - DNA, 48 bp, Artificial sequence
  Synthetic
gcctccctcgcgccatcagctcacagacatgctgcctcccgtaggagt

SEQ ID NO: 1365 - DNA, 8 bp, Artificial sequence
  Synthetic
ctcactca

SEQ ID NO: 1366 - DNA, 48 bp, Artificial sequence
  Synthetic
gcctccctcgcgccatcagctcactcacatgctgcctcccgtaggagt

SEQ ID NO: 1367 - DNA, 8 bp, Artificial sequence
  Synthetic
ctcactgt

SEQ ID NO: 1368 - DNA, 48 bp, Artificial sequence
  Synthetic
gcctccctcgcgccatcagctcactgtcatgctgcctcccgtaggagt

SEQ ID NO: 1369 - DNA, 8 bp, Artificial sequence
  Synthetic
ctcagaca

SEQ ID NO: 1370 - DNA, 48 bp, Artificial sequence
  Synthetic
gcctccctcgcgccatcagctcagacacatgctgcctcccgtaggagt

SEQ ID NO: 1371 - DNA, 8 bp, Artificial sequence
  Synthetic
ctcagagt

SEQ ID NO: 1372 - DNA, 48 bp, Artificial sequence
  Synthetic
gcctccctcgcgccatcagctcagagtcatgctgcctcccgtaggagt

SEQ ID NO: 1373 - DNA, 8 bp, Artificial sequence
  Synthetic
ctcagtct

SEQ ID NO: 1374 - DNA, 48 bp, Artificial sequence
  Synthetic
gcctccctcgcgccatcagctcagtctcatgctgcctcccgtaggagt

SEQ ID NO: 1375 - DNA, 8 bp, Artificial sequence
  Synthetic
ctcagtga

SEQ ID NO: 1376 - DNA, 48 bp, Artificial sequence
  Synthetic
gcctccctcgcgccatcagctcagtgacatgctgcctcccgtaggagt

SEQ ID NO: 1377 - DNA, 8 bp, Artificial sequence
  Synthetic
ctcatcac

SEQ ID NO: 1378 - DNA, 48 bp, Artificial sequence
  Synthetic
gcctccctcgcgccatcagctcatcaccatgctgcctcccgtaggagt

SEQ ID NO: 1379 - DNA, 8 bp, Artificial sequence
  Synthetic
ctcatctg

SEQ ID NO: 1380 - DNA, 48 bp, Artificial sequence
  Synthetic
gcctccctcgcgccatcagctcatctgcatgctgcctcccgtaggagt

SEQ ID NO: 1381 - DNA, 8 bp, Artificial sequence
  Synthetic
ctcatgag

SEQ ID NO: 1382 - DNA, 48 bp, Artificial sequence
  Synthetic
gcctccctcgcgccatcagctcatgagcatgctgcctcccgtaggagt

SEQ ID NO: 1383 - DNA, 8 bp, Artificial sequence
  Synthetic
ctcatgtc

SEQ ID NO: 1384 - DNA, 48 bp, Artificial sequence
  Synthetic
gcctccctcgcgccatcagctcatgtccatgctgcctcccgtaggagt

SEQ ID NO: 1385 - DNA, 8 bp, Artificial sequence
  Synthetic
ctctacac

SEQ ID NO: 1386 - DNA, 48 bp, Artificial sequence
  Synthetic
gcctccctcgcgccatcagctctacaccatgctgcctcccgtaggagt

SEQ ID NO: 1387 - DNA, 8 bp, Artificial sequence
  Synthetic
ctctactg

SEQ ID NO: 1388 - DNA, 48 bp, Artificial sequence
  Synthetic
gcctccctcgcgccatcagctctactgcatgctgcctcccgtaggagt

SEQ ID NO: 1389 - DNA, 8 bp, Artificial sequence
  Synthetic
ctctagag

SEQ ID NO: 1390 - DNA, 48 bp, Artificial sequence
  Synthetic
gcctccctcgcgccatcagctctagagcatgctgcctcccgtaggagt

SEQ ID NO: 1391 - DNA, 8 bp, Artificial sequence
  Synthetic
ctctagtc

SEQ ID NO: 1392 - DNA, 48 bp, Artificial sequence
  Synthetic
gcctccctcgcgccatcagctctagtccatgctgcctcccgtaggagt

SEQ ID NO: 1393 - DNA, 8 bp, Artificial sequence
  Synthetic
ctctcaca

SEQ ID NO: 1394 - DNA, 48 bp, Artificial sequence
  Synthetic
gcctccctcgcgccatcagctctcacacatgctgcctcccgtaggagt

SEQ ID NO: 1395 - DNA, 8 bp, Artificial sequence
  Synthetic
ctctcagt

SEQ ID NO: 1396 - DNA, 48 bp, Artificial sequence
  Synthetic
gcctccctcgcgccatcagctctcagtcatgctgcctcccgtaggagt

SEQ ID NO: 1397 - DNA, 8 bp, Artificial sequence
  Synthetic
ctctctct

SEQ ID NO: 1398 - DNA, 48 bp, Artificial sequence
  Synthetic
gcctccctcgcgccatcagctctctctcatgctgcctcccgtaggagt

SEQ ID NO: 1399 - DNA, 8 bp, Artificial sequence
  Synthetic
ctctctga

SEQ ID NO: 1400 - DNA, 48 bp, Artificial sequence
  Synthetic
gcctccctcgcgccatcagctctctgacatgctgcctcccgtaggagt

SEQ ID NO: 1401 - DNA, 8 bp, Artificial sequence
  Synthetic
ctctgact

SEQ ID NO: 1402 - DNA, 48 bp, Artificial sequence
  Synthetic
gcctccctcgcgccatcagctctgactcatgctgcctcccgtaggagt

SEQ ID NO: 1403 - DNA, 8 bp, Artificial sequence
  Synthetic
ctctgaga

SEQ ID NO: 1404 - DNA, 48 bp, Artificial sequence
  Synthetic
gcctccctcgcgccatcagctctgagacatgctgcctcccgtaggagt

SEQ ID NO: 1405 - DNA, 8 bp, Artificial sequence
  Synthetic
ctctgtca

SEQ ID NO: 1406 - DNA, 48 bp, Artificial sequence
  Synthetic
gcctccctcgcgccatcagctctgtcacatgctgcctcccgtaggagt

SEQ ID NO: 1407 - DNA, 8 bp, Artificial sequence
  Synthetic
ctctgtgt

SEQ ID NO: 1408 - DNA, 48 bp, Artificial sequence
  Synthetic
gcctccctcgcgccatcagctctgtgtcatgctgcctcccgtaggagt

SEQ ID NO: 1409 - DNA, 8 bp, Artificial sequence
  Synthetic
ctcttcag

SEQ ID NO: 1410 - DNA, 48 bp, Artificial sequence
  Synthetic
gcctccctcgcgccatcagctcttcagcatgctgcctcccgtaggagt

SEQ ID NO: 1411 - DNA, 8 bp, Artificial sequence
  Synthetic
ctcttctc

SEQ ID NO: 1412 - DNA, 48 bp, Artificial sequence
  Synthetic
gcctccctcgcgccatcagctcttctccatgctgcctcccgtaggagt

SEQ ID NO: 1413 - DNA, 8 bp, Artificial sequence
  Synthetic
ctcttgac

SEQ ID NO: 1414 - DNA, 48 bp, Artificial sequence
  Synthetic
gcctccctcgcgccatcagctcttgaccatgctgcctcccgtaggagt

SEQ ID NO: 1415 - DNA, 8 bp, Artificial sequence
  Synthetic
ctcttgtg

SEQ ID NO: 1416 - DNA, 48 bp, Artificial sequence
  Synthetic
gcctccctcgcgccatcagctcttgtgcatgctgcctcccgtaggagt

SEQ ID NO: 1417 - DNA, 8 bp, Artificial sequence
  Synthetic
ctgaacac

SEQ ID NO: 1418 - DNA, 48 bp, Artificial sequence
  Synthetic
gcctccctcgcgccatcagctgaacaccatgctgcctcccgtaggagt

SEQ ID NO: 1419 - DNA, 8 bp, Artificial sequence
  Synthetic
ctgaactg

SEQ ID NO: 1420 - DNA, 48 bp, Artificial sequence
  Synthetic
gcctccctcgcgccatcagctgaactgcatgctgcctcccgtaggagt

SEQ ID NO: 1421 - DNA, 8 bp, Artificial sequence
  Synthetic
ctgaagag

SEQ ID NO: 1422 - DNA, 48 bp, Artificial sequence
  Synthetic
gcctccctcgcgccatcagctgaagagcatgctgcctcccgtaggagt

SEQ ID NO: 1423 - DNA, 8 bp, Artificial sequence
  Synthetic
ctgaagtc

SEQ ID NO: 1424 - DNA, 48 bp, Artificial sequence
  Synthetic
gcctccctcgcgccatcagctgaagtccatgctgcctcccgtaggagt

SEQ ID NO: 1425 - DNA, 8 bp, Artificial sequence
  Synthetic
ctgacaca

SEQ ID NO: 1426 - DNA, 48 bp, Artificial sequence
  Synthetic
gcctccctcgcgccatcagctgacacacatgctgcctcccgtaggagt

SEQ ID NO: 1427 - DNA, 8 bp, Artificial sequence
  Synthetic
ctgacagt

SEQ ID NO: 1428 - DNA, 48 bp, Artificial sequence
  Synthetic
gcctccctcgcgccatcagctgacagtcatgctgcctcccgtaggagt

SEQ ID NO: 1429 - DNA, 8 bp, Artificial sequence
  Synthetic
ctgactct

SEQ ID NO: 1430 - DNA, 48 bp, Artificial sequence
  Synthetic
gcctccctcgcgccatcagctgactctcatgctgcctcccgtaggagt

SEQ ID NO: 1431 - DNA, 8 bp, Artificial sequence
  Synthetic
ctgactga

SEQ ID NO: 1432 - DNA, 48 bp, Artificial sequence
  Synthetic
gcctccctcgcgccatcagctgactgacatgctgcctcccgtaggagt

SEQ ID NO: 1433 - DNA, 8 bp, Artificial sequence
  Synthetic
ctgagact

SEQ ID NO: 1434 - DNA, 48 bp, Artificial sequence
  Synthetic
gcctccctcgcgccatcagctgagactcatgctgcctcccgtaggagt

SEQ ID NO: 1435 - DNA, 8 bp, Artificial sequence
  Synthetic
ctgagaga

SEQ ID NO: 1436 - DNA, 48 bp, Artificial sequence
  Synthetic
gcctccctcgcgccatcagctgagagacatgctgcctcccgtaggagt

SEQ ID NO: 1437 - DNA, 8 bp, Artificial sequence
  Synthetic
ctgagtca

SEQ ID NO: 1438 - DNA, 48 bp, Artificial sequence
  Synthetic
gcctccctcgcgccatcagctgagtcacatgctgcctcccgtaggagt

SEQ ID NO: 1439 - DNA, 8 bp, Artificial sequence
  Synthetic
ctgagtgt

SEQ ID NO: 1440 - DNA, 48 bp, Artificial sequence
  Synthetic
gcctccctcgcgccatcagctgagtgtcatgctgcctcccgtaggagt

SEQ ID NO: 1441 - DNA, 8 bp, Artificial sequence
  Synthetic
gatcagct

SEQ ID NO: 1442 - DNA, 48 bp, Artificial sequence
  Synthetic
gcctccctcgcgccatcaggatcagctcatgctgcctcccgtaggagt

SEQ ID NO: 1443 - DNA, 8 bp, Artificial sequence
  Synthetic
gatcagga

SEQ ID NO: 1444 - DNA, 48 bp, Artificial sequence
  Synthetic
gcctccctcgcgccatcaggatcaggacatgctgcctcccgtaggagt

SEQ ID NO: 1445 - DNA, 8 bp, Artificial sequence
  Synthetic
gatccaac

SEQ ID NO: 1446 - DNA, 48 bp, Artificial sequence
  Synthetic
gcctccctcgcgccatcaggatccaaccatgctgcctcccgtaggagt

SEQ ID NO: 1447 - DNA, 8 bp, Artificial sequence
  Synthetic
gatccatg

SEQ ID NO: 1448 - DNA, 48 bp, Artificial sequence
  Synthetic
gcctccctcgcgccatcaggatccatgcatgctgcctcccgtaggagt

SEQ ID NO: 1449 - DNA, 8 bp, Artificial sequence
  Synthetic
gatcctag

SEQ ID NO: 1450 - DNA, 48 bp, Artificial sequence
  Synthetic
gcctccctcgcgccatcaggatcctagcatgctgcctcccgtaggagt

SEQ ID NO: 1451 - DNA, 8 bp, Artificial sequence
  Synthetic
gatccttc

SEQ ID NO: 1452 - DNA, 48 bp, Artificial sequence
  Synthetic
gcctccctcgcgccatcaggatccttccatgctgcctcccgtaggagt

SEQ ID NO: 1453 - DNA, 8 bp, Artificial sequence
  Synthetic
gatcgaag

SEQ ID NO: 1454 - DNA, 48 bp, Artificial sequence
  Synthetic
gcctccctcgcgccatcaggatcgaagcatgctgcctcccgtaggagt

SEQ ID NO: 1455 - DNA, 8 bp, Artificial sequence
  Synthetic
gatcgatc

SEQ ID NO: 1456 - DNA, 48 bp, Artificial sequence
  Synthetic
gcctccctcgcgccatcaggatcgatccatgctgcctcccgtaggagt

SEQ ID NO: 1457 - DNA, 8 bp, Artificial sequence
  Synthetic
gatcgtac

SEQ ID NO: 1458 - DNA, 48 bp, Artificial sequence
  Synthetic
gcctccctcgcgccatcaggatcgtaccatgctgcctcccgtaggagt

SEQ ID NO: 1459 - DNA, 8 bp, Artificial sequence
  Synthetic
gatcgttg

SEQ ID NO: 1460 - DNA, 48 bp, Artificial sequence
  Synthetic
gcctccctcgcgccatcaggatcgttgcatgctgcctcccgtaggagt

SEQ ID NO: 1461 - DNA, 8 bp, Artificial sequence
  Synthetic
gatctcct

SEQ ID NO: 1462 - DNA, 48 bp, Artificial sequence
  Synthetic
gcctccctcgcgccatcaggatctcctcatgctgcctcccgtaggagt

SEQ ID NO: 1463 - DNA, 8 bp, Artificial sequence
  Synthetic
gatctcga

SEQ ID NO: 1464 - DNA, 48 bp, Artificial sequence
  Synthetic
gcctccctcgcgccatcaggatctcgacatgctgcctcccgtaggagt

SEQ ID NO: 1465 - DNA, 8 bp, Artificial sequence
  Synthetic
gatctgca

SEQ ID NO: 1466 - DNA, 48 bp, Artificial sequence
  Synthetic
gcctccctcgcgccatcaggatctgcacatgctgcctcccgtaggagt

SEQ ID NO: 1467 - DNA, 8 bp, Artificial sequence
  Synthetic
gatctggt

SEQ ID NO: 1468 - DNA, 48 bp, Artificial sequence
  Synthetic
gcctccctcgcgccatcaggatctggtcatgctgcctcccgtaggagt

SEQ ID NO: 1469 - DNA, 8 bp, Artificial sequence
  Synthetic
gatgacct

SEQ ID NO: 1470 - DNA, 48 bp, Artificial sequence
  Synthetic
gcctccctcgcgccatcaggatgacctcatgctgcctcccgtaggagt

SEQ ID NO: 1471 - DNA, 8 bp, Artificial sequence
  Synthetic
gatgacga

SEQ ID NO: 1472 - DNA, 48 bp, Artificial sequence
  Synthetic
gcctccctcgcgccatcaggatgacgacatgctgcctcccgtaggagt

SEQ ID NO: 1473 - DNA, 8 bp, Artificial sequence
  Synthetic
gatgagca

SEQ ID NO: 1474 - DNA, 48 bp, Artificial sequence
  Synthetic
gcctccctcgcgccatcaggatgagcacatgctgcctcccgtaggagt

SEQ ID NO: 1475 - DNA, 8 bp, Artificial sequence
  Synthetic
gatgaggt

SEQ ID NO: 1476 - DNA, 48 bp, Artificial sequence
  Synthetic
gcctccctcgcgccatcaggatgaggtcatgctgcctcccgtaggagt

SEQ ID NO: 1477 - DNA, 8 bp, Artificial sequence
  Synthetic
gatgcaag

SEQ ID NO: 1478 - DNA, 48 bp, Artificial sequence
  Synthetic
gcctccctcgcgccatcaggatgcaagcatgctgcctcccgtaggagt

SEQ ID NO: 1479 - DNA, 8 bp, Artificial sequence
  Synthetic
gatgcatc

SEQ ID NO: 1480 - DNA, 48 bp, Artificial sequence
  Synthetic
gcctccctcgcgccatcaggatgcatccatgctgcctcccgtaggagt

SEQ ID NO: 1481 - DNA, 8 bp, Artificial sequence
  Synthetic
gatgctac

SEQ ID NO: 1482 - DNA, 48 bp, Artificial sequence
  Synthetic
gcctccctcgcgccatcaggatgctaccatgctgcctcccgtaggagt

SEQ ID NO: 1483 - DNA, 8 bp, Artificial sequence
  Synthetic
gatgcttg

SEQ ID NO: 1484 - DNA, 48 bp, Artificial sequence
  Synthetic
gcctccctcgcgccatcaggatgcttgcatgctgcctcccgtaggagt

SEQ ID NO: 1485 - DNA, 8 bp, Artificial sequence
  Synthetic
gatggaac

SEQ ID NO: 1486 - DNA, 48 bp, Artificial sequence
  Synthetic
gcctccctcgcgccatcaggatggaaccatgctgcctcccgtaggagt

SEQ ID NO: 1487 - DNA, 8 bp, Artificial sequence
  Synthetic
gatggatg

SEQ ID NO: 1488 - DNA, 48 bp, Artificial sequence
  Synthetic
gcctccctcgcgccatcaggatggatgcatgctgcctcccgtaggagt

SEQ ID NO: 1489 - DNA, 8 bp, Artificial sequence
  Synthetic
gatggtag

SEQ ID NO: 1490 - DNA, 48 bp, Artificial sequence
  Synthetic
gcctccctcgcgccatcaggatggtagcatgctgcctcccgtaggagt

SEQ ID NO: 1491 - DNA, 8 bp, Artificial sequence
  Synthetic
gatggttc

SEQ ID NO: 1492 - DNA, 48 bp, Artificial sequence
  Synthetic
gcctccctcgcgccatcaggatggttccatgctgcctcccgtaggagt

SEQ ID NO: 1493 - DNA, 8 bp, Artificial sequence
  Synthetic
gatgtcca

SEQ ID NO: 1494 - DNA, 48 bp, Artificial sequence
  Synthetic
gcctccctcgcgccatcaggatgtccacatgctgcctcccgtaggagt

SEQ ID NO: 1495 - DNA, 8 bp, Artificial sequence
  Synthetic
gatgtcgt

SEQ ID NO: 1496 - DNA, 48 bp, Artificial sequence
  Synthetic
gcctccctcgcgccatcaggatgtcgtcatgctgcctcccgtaggagt

SEQ ID NO: 1497 - DNA, 8 bp, Artificial sequence
  Synthetic
gatgtgct

SEQ ID NO: 1498 - DNA, 48 bp, Artificial sequence
  Synthetic
gcctccctcgcgccatcaggatgtgctcatgctgcctcccgtaggagt

SEQ ID NO: 1499 - DNA, 8 bp, Artificial sequence
  Synthetic
gatgtgga

SEQ ID NO: 1500 - DNA, 48 bp, Artificial sequence
  Synthetic
gcctccctcgcgccatcaggatgtggacatgctgcctcccgtaggagt

SEQ ID NO: 1501 - DNA, 8 bp, Artificial sequence
  Synthetic
gcaaccat

SEQ ID NO: 1502 - DNA, 48 bp, Artificial sequence
  Synthetic
gcctccctcgcgccatcaggcaaccatcatgctgcctcccgtaggagt

SEQ ID NO: 1503 - DNA, 8 bp, Artificial sequence
  Synthetic
gcaaccta

SEQ ID NO: 1504 - DNA, 48 bp, Artificial sequence
  Synthetic
gcctccctcgcgccatcaggcaacctacatgctgcctcccgtaggagt

SEQ ID NO: 1505 - DNA, 8 bp, Artificial sequence
  Synthetic
gcaacgaa

SEQ ID NO: 1506 - DNA, 48 bp, Artificial sequence
  Synthetic
gcctccctcgcgccatcaggcaacgaacatgctgcctcccgtaggagt

SEQ ID NO: 1507 - DNA, 8 bp, Artificial sequence
  Synthetic
gcaacgtt

SEQ ID NO: 1508 - DNA, 48 bp, Artificial sequence
  Synthetic
gcctccctcgcgccatcaggcaacgttcatgctgcctcccgtaggagt

SEQ ID NO: 1509 - DNA, 8 bp, Artificial sequence
  Synthetic
gcaagcaa

SEQ ID NO: 1510 - DNA, 48 bp, Artificial sequence
  Synthetic
gcctccctcgcgccatcaggcaagcaacatgctgcctcccgtaggagt

SEQ ID NO: 1511 - DNA, 8 bp, Artificial sequence
  Synthetic
gcaagctt

SEQ ID NO: 1512 - DNA, 48 bp, Artificial sequence
  Synthetic
gcctccctcgcgccatcaggcaagcttcatgctgcctcccgtaggagt

SEQ ID NO: 1513 - DNA, 8 bp, Artificial sequence
  Synthetic
gcaaggat

SEQ ID NO: 1514 - DNA, 48 bp, Artificial sequence
  Synthetic
gcctccctcgcgccatcaggcaaggatcatgctgcctcccgtaggagt

SEQ ID NO: 1515 - DNA, 8 bp, Artificial sequence
  Synthetic
gcaaggta

SEQ ID NO: 1516 - DNA, 48 bp, Artificial sequence
  Synthetic
gcctccctcgcgccatcaggcaaggtacatgctgcctcccgtaggagt

SEQ ID NO: 1517 - DNA, 8 bp, Artificial sequence
  Synthetic
gcaatacc

SEQ ID NO: 1518 - DNA, 48 bp, Artificial sequence
  Synthetic
gcctccctcgcgccatcaggcaatacccatgctgcctcccgtaggagt

SEQ ID NO: 1519 - DNA, 8 bp, Artificial sequence
  Synthetic
gcaatagg

SEQ ID NO: 1520 - DNA, 48 bp, Artificial sequence
  Synthetic
gcctccctcgcgccatcaggcaataggcatgctgcctcccgtaggagt

SEQ ID NO: 1521 - DNA, 8 bp, Artificial sequence
  Synthetic
gcaattcg

SEQ ID NO: 1522 - DNA, 48 bp, Artificial sequence
  Synthetic
gcctccctcgcgccatcaggcaattcgcatgctgcctcccgtaggagt

SEQ ID NO: 1523 - DNA, 8 bp, Artificial sequence
  Synthetic
gcaattgc

SEQ ID NO: 1524 - DNA, 48 bp, Artificial sequence
  Synthetic
gcctccctcgcgccatcaggcaattgccatgctgcctcccgtaggagt

SEQ ID NO: 1525 - DNA, 8 bp, Artificial sequence
  Synthetic
gcataacc

SEQ ID NO: 1526 - DNA, 48 bp, Artificial sequence
  Synthetic
gcctccctcgcgccatcaggcataacccatgctgcctcccgtaggagt

SEQ ID NO: 1527 - DNA, 8 bp, Artificial sequence
  Synthetic
gcataagg

SEQ ID NO: 1528 - DNA, 48 bp, Artificial sequence
  Synthetic
gcctccctcgcgccatcaggcataaggcatgctgcctcccgtaggagt

SEQ ID NO: 1529 - DNA, 8 bp, Artificial sequence
  Synthetic
gcatatcg

SEQ ID NO: 1530 - DNA, 48 bp, Artificial sequence
  Synthetic
gcctccctcgcgccatcaggcatatcgcatgctgcctcccgtaggagt

SEQ ID NO: 1531 - DNA, 8 bp, Artificial sequence
  Synthetic
gcatatgc

SEQ ID NO: 1532 - DNA, 48 bp, Artificial sequence
  Synthetic
gcctccctcgcgccatcaggcatatgccatgctgcctcccgtaggagt

SEQ ID NO: 1533 - DNA, 8 bp, Artificial sequence
  Synthetic
gcatccaa

SEQ ID NO: 1534 - DNA, 48 bp, Artificial sequence
  Synthetic
gcctccctcgcgccatcaggcatccaacatgctgcctcccgtaggagt

SEQ ID NO: 1535 - DNA, 8 bp, Artificial sequence
  Synthetic
gcatcctt

SEQ ID NO: 1536 - DNA, 48 bp, Artificial sequence
  Synthetic
gcctccctcgcgccatcaggcatccttcatgctgcctcccgtaggagt

SEQ ID NO: 1537 - DNA, 8 bp, Artificial sequence
  Synthetic
gcatcgat

SEQ ID NO: 1538 - DNA, 48 bp, Artificial sequence
  Synthetic
gcctccctcgcgccatcaggcatcgatcatgctgcctcccgtaggagt

SEQ ID NO: 1539 - DNA, 8 bp, Artificial sequence
  Synthetic
gcatcgta

SEQ ID NO: 1540 - DNA, 48 bp, Artificial sequence
  Synthetic
gcctccctcgcgccatcaggcatcgtacatgctgcctcccgtaggagt

SEQ ID NO: 1541 - DNA, 8 bp, Artificial sequence
  Synthetic
gcatgcat

SEQ ID NO: 1542 - DNA, 48 bp, Artificial sequence
  Synthetic
gcctccctcgcgccatcaggcatgcatcatgctgcctcccgtaggagt

SEQ ID NO: 1543 - DNA, 8 bp, Artificial sequence
  Synthetic
gcatgcta

SEQ ID NO: 1544 - DNA, 48 bp, Artificial sequence
  Synthetic
gcctccctcgcgccatcaggcatgctacatgctgcctcccgtaggagt

SEQ ID NO: 1545 - DNA, 8 bp, Artificial sequence
  Synthetic
gcatggaa

SEQ ID NO: 1546 - DNA, 48 bp, Artificial sequence
  Synthetic
gcctccctcgcgccatcaggcatggaacatgctgcctcccgtaggagt

SEQ ID NO: 1547 - DNA, 8 bp, Artificial sequence
  Synthetic
gcatggtt

SEQ ID NO: 1548 - DNA, 48 bp, Artificial sequence
  Synthetic
gcctccctcgcgccatcaggcatggttcatgctgcctcccgtaggagt

SEQ ID NO: 1549 - DNA, 8 bp, Artificial sequence
  Synthetic
gcattacg

SEQ ID NO: 1550 - DNA, 48 bp, Artificial sequence
  Synthetic
gcctccctcgcgccatcaggcattacgcatgctgcctcccgtaggagt

SEQ ID NO: 1551 - DNA, 8 bp, Artificial sequence
  Synthetic
gcattagc

SEQ ID NO: 1552 - DNA, 48 bp, Artificial sequence
  Synthetic
gcctccctcgcgccatcaggcattagccatgctgcctcccgtaggagt

SEQ ID NO: 1553 - DNA, 8 bp, Artificial sequence
  Synthetic
gccgaatt

SEQ ID NO: 1554 - DNA, 48 bp, Artificial sequence
  Synthetic
gcctccctcgcgccatcaggccgaattcatgctgcctcccgtaggagt

SEQ ID NO: 1555 - DNA, 8 bp, Artificial sequence
  Synthetic
gccgatat

SEQ ID NO: 1556 - DNA, 48 bp, Artificial sequence
  Synthetic
gcctccctcgcgccatcaggccgatatcatgctgcctcccgtaggagt

SEQ ID NO: 1557 - DNA, 8 bp, Artificial sequence
  Synthetic
gccgatta

SEQ ID NO: 1558 - DNA, 48 bp, Artificial sequence
  Synthetic
gcctccctcgcgccatcaggccgattacatgctgcctcccgtaggagt

SEQ ID NO: 1559 - DNA, 8 bp, Artificial sequence
  Synthetic
gccgtaat

SEQ ID NO: 1560 - DNA, 48 bp, Artificial sequence
  Synthetic
gcctccctcgcgccatcaggccgtaatcatgctgcctcccgtaggagt

SEQ ID NO: 1561 - DNA, 8 bp, Artificial sequence
  Synthetic
gccgtata

SEQ ID NO: 1562 - DNA, 48 bp, Artificial sequence
  Synthetic
gcctccctcgcgccatcaggccgtatacatgctgcctcccgtaggagt

SEQ ID NO: 1563 - DNA, 8 bp, Artificial sequence
  Synthetic
gccgttaa

SEQ ID NO: 1564 - DNA, 48 bp, Artificial sequence
  Synthetic
gcctccctcgcgccatcaggccgttaacatgctgcctcccgtaggagt

SEQ ID NO: 1565 - DNA, 8 bp, Artificial sequence
  Synthetic
gcgcaatt

SEQ ID NO: 1566 - DNA, 48 bp, Artificial sequence
  Synthetic
gcctccctcgcgccatcaggcgcaattcatgctgcctcccgtaggagt

SEQ ID NO: 1567 - DNA, 8 bp, Artificial sequence
  Synthetic
gcgcatat

SEQ ID NO: 1568 - DNA, 48 bp, Artificial sequence
  Synthetic
gcctccctcgcgccatcaggcgcatatcatgctgcctcccgtaggagt

SEQ ID NO: 1569 - DNA, 8 bp, Artificial sequence
  Synthetic
gcgcatta

SEQ ID NO: 1570 - DNA, 48 bp, Artificial sequence
  Synthetic
gcctccctcgcgccatcaggcgcattacatgctgcctcccgtaggagt

SEQ ID NO: 1571 - DNA, 8 bp, Artificial sequence
  Synthetic
gcgctaat

SEQ ID NO: 1572 - DNA, 48 bp, Artificial sequence
  Synthetic
gcctccctcgcgccatcaggcgctaatcatgctgcctcccgtaggagt

SEQ ID NO: 1573 - DNA, 8 bp, Artificial sequence
  Synthetic
gcgctata

SEQ ID NO: 1574 - DNA, 48 bp, Artificial sequence
  Synthetic
gcctccctcgcgccatcaggcgctatacatgctgcctcccgtaggagt

SEQ ID NO: 1575 - DNA, 8 bp, Artificial sequence
  Synthetic
gcgcttaa

SEQ ID NO: 1576 - DNA, 48 bp, Artificial sequence
  Synthetic
gcctccctcgcgccatcaggcgcttaacatgctgcctcccgtaggagt

SEQ ID NO: 1577 - DNA, 8 bp, Artificial sequence
  Synthetic
gcggaata

SEQ ID NO: 1578 - DNA, 48 bp, Artificial sequence
  Synthetic
gcctccctcgcgccatcaggcggaatacatgctgcctcccgtaggagt

SEQ ID NO: 1579 - DNA, 8 bp, Artificial sequence
  Synthetic
gcggataa

SEQ ID NO: 1580 - DNA, 48 bp, Artificial sequence
  Synthetic
gcctccctcgcgccatcaggcggataacatgctgcctcccgtaggagt

SEQ ID NO: 1581 - DNA, 8 bp, Artificial sequence
  Synthetic
gcggtatt

SEQ ID NO: 1582 - DNA, 48 bp, Artificial sequence
  Synthetic
gcctccctcgcgccatcaggcggtattcatgctgcctcccgtaggagt

SEQ ID NO: 1583 - DNA, 8 bp, Artificial sequence
  Synthetic
gcggttat

SEQ ID NO: 1584 - DNA, 48 bp, Artificial sequence
  Synthetic
gcctccctcgcgccatcaggcggttatcatgctgcctcccgtaggagt

SEQ ID NO: 1585 - DNA, 8 bp, Artificial sequence
  Synthetic
gctaatcg

SEQ ID NO: 1586 - DNA, 48 bp, Artificial sequence
  Synthetic
gcctccctcgcgccatcaggctaatcgcatgctgcctcccgtaggagt

SEQ ID NO: 1587 - DNA, 8 bp, Artificial sequence
  Synthetic
gctaatgc

SEQ ID NO: 1588 - DNA, 48 bp, Artificial sequence
  Synthetic
gcctccctcgcgccatcaggctaatgccatgctgcctcccgtaggagt

SEQ ID NO: 1589 - DNA, 8 bp, Artificial sequence
  Synthetic
gctaccaa

SEQ ID NO: 1590 - DNA, 48 bp, Artificial sequence
  Synthetic
gcctccctcgcgccatcaggctaccaacatgctgcctcccgtaggagt

SEQ ID NO: 1591 - DNA, 8 bp, Artificial sequence
  Synthetic
gctacctt

SEQ ID NO: 1592 - DNA, 48 bp, Artificial sequence
  Synthetic
gcctccctcgcgccatcaggctaccttcatgctgcctcccgtaggagt

SEQ ID NO: 1593 - DNA, 8 bp, Artificial sequence
  Synthetic
gctacgat

SEQ ID NO: 1594 - DNA, 48 bp, Artificial sequence
  Synthetic
gcctccctcgcgccatcaggctacgatcatgctgcctcccgtaggagt

SEQ ID NO: 1595 - DNA, 8 bp, Artificial sequence
  Synthetic
gctacgta

SEQ ID NO: 1596 - DNA, 48 bp, Artificial sequence
  Synthetic
gcctccctcgcgccatcaggctacgtacatgctgcctcccgtaggagt

SEQ ID NO: 1597 - DNA, 8 bp, Artificial sequence
  Synthetic
gctagcat

SEQ ID NO: 1598 - DNA, 48 bp, Artificial sequence
  Synthetic
gcctccctcgcgccatcaggctagcatcatgctgcctcccgtaggagt

SEQ ID NO: 1599 - DNA, 8 bp, Artificial sequence
  Synthetic
gctagcta

SEQ ID NO: 1600 - DNA, 48 bp, Artificial sequence
  Synthetic
gcctccctcgcgccatcaggctagctacatgctgcctcccgtaggagt

SEQ ID NO: 1601 - DNA, 8 bp, Artificial sequence
  Synthetic
gctaggaa

SEQ ID NO: 1602 - DNA, 48 bp, Artificial sequence
  Synthetic
gcctccctcgcgccatcaggctaggaacatgctgcctcccgtaggagt

SEQ ID NO: 1603 - DNA, 8 bp, Artificial sequence
  Synthetic
gctaggtt

SEQ ID NO: 1604 - DNA, 48 bp, Artificial sequence
  Synthetic
gcctccctcgcgccatcaggctaggttcatgctgcctcccgtaggagt

SEQ ID NO: 1605 - DNA, 8 bp, Artificial sequence
  Synthetic
gctatacg

SEQ ID NO: 1606 - DNA, 48 bp, Artificial sequence
  Synthetic
gcctccctcgcgccatcaggctatacgcatgctgcctcccgtaggagt

SEQ ID NO: 1607 - DNA, 8 bp, Artificial sequence
  Synthetic
gctatagc

SEQ ID NO: 1608 - DNA, 48 bp, Artificial sequence
  Synthetic
gcctccctcgcgccatcaggctatagccatgctgcctcccgtaggagt

SEQ ID NO: 1609 - DNA, 8 bp, Artificial sequence
  Synthetic
gctattcc

SEQ ID NO: 1610 - DNA, 48 bp, Artificial sequence
  Synthetic
gcctccctcgcgccatcaggctattcccatgctgcctcccgtaggagt

SEQ ID NO: 1611 - DNA, 8 bp, Artificial sequence
  Synthetic
gctattgg

SEQ ID NO: 1612 - DNA, 48 bp, Artificial sequence
  Synthetic
gcctccctcgcgccatcaggctattggcatgctgcctcccgtaggagt

SEQ ID NO: 1613 - DNA, 8 bp, Artificial sequence
  Synthetic
gcttaacg

SEQ ID NO: 1614 - DNA, 48 bp, Artificial sequence
  Synthetic
gcctccctcgcgccatcaggcttaacgcatgctgcctcccgtaggagt

SEQ ID NO: 1615 - DNA, 8 bp, Artificial sequence
  Synthetic
gcttaagc

SEQ ID NO: 1616 - DNA, 48 bp, Artificial sequence
  Synthetic
gcctccctcgcgccatcaggcttaagccatgctgcctcccgtaggagt

SEQ ID NO: 1617 - DNA, 8 bp, Artificial sequence
  Synthetic
gcttatcc

SEQ ID NO: 1618 - DNA, 48 bp, Artificial sequence
  Synthetic
gcctccctcgcgccatcaggcttatcccatgctgcctcccgtaggagt

SEQ ID NO: 1619 - DNA, 8 bp, Artificial sequence
  Synthetic
gcttatgg

SEQ ID NO: 1620 - DNA, 48 bp, Artificial sequence
  Synthetic
gcctccctcgcgccatcaggcttatggcatgctgcctcccgtaggagt

SEQ ID NO: 1621 - DNA, 8 bp, Artificial sequence
  Synthetic
gcttccat

SEQ ID NO: 1622 - DNA, 48 bp, Artificial sequence
  Synthetic
gcctccctcgcgccatcaggcttccatcatgctgcctcccgtaggagt

SEQ ID NO: 1623 - DNA, 8 bp, Artificial sequence
  Synthetic
gcttccta

SEQ ID NO: 1624 - DNA, 48 bp, Artificial sequence
  Synthetic
gcctccctcgcgccatcaggcttcctacatgctgcctcccgtaggagt

SEQ ID NO: 1625 - DNA, 8 bp, Artificial sequence
  Synthetic
gcttcgaa

SEQ ID NO: 1626 - DNA, 48 bp, Artificial sequence
  Synthetic
gcctccctcgcgccatcaggcttcgaacatgctgcctcccgtaggagt

SEQ ID NO: 1627 - DNA, 8 bp, Artificial sequence
  Synthetic
gcttcgtt

SEQ ID NO: 1628 - DNA, 48 bp, Artificial sequence
  Synthetic
gcctccctcgcgccatcaggcttcgttcatgctgcctcccgtaggagt

SEQ ID NO: 1629 - DNA, 8 bp, Artificial sequence
  Synthetic
gcttgcaa

SEQ ID NO: 1630 - DNA, 48 bp, Artificial sequence
  Synthetic
gcctccctcgcgccatcaggcttgcaacatgctgcctcccgtaggagt

SEQ ID NO: 1631 - DNA, 8 bp, Artificial sequence
  Synthetic
gcttgctt

SEQ ID NO: 1632 - DNA, 48 bp, Artificial sequence
  Synthetic
gcctccctcgcgccatcaggcttgcttcatgctgcctcccgtaggagt

SEQ ID NO: 1633 - DNA, 8 bp, Artificial sequence
  Synthetic
gcttggat

SEQ ID NO: 1634 - DNA, 48 bp, Artificial sequence
  Synthetic
gcctccctcgcgccatcaggcttggatcatgctgcctcccgtaggagt

SEQ ID NO: 1635 - DNA, 8 bp, Artificial sequence
  Synthetic
gcttggta

SEQ ID NO: 1636 - DNA, 48 bp, Artificial sequence
  Synthetic
gcctccctcgcgccatcaggcttggtacatgctgcctcccgtaggagt

SEQ ID NO: 1637 - DNA, 8 bp, Artificial sequence
  Synthetic
ggaaccaa

SEQ ID NO: 1638 - DNA, 48 bp, Artificial sequence
  Synthetic
gcctccctcgcgccatcagggaaccaacatgctgcctcccgtaggagt

SEQ ID NO: 1639 - DNA, 8 bp, Artificial sequence
  Synthetic
ggaacctt

SEQ ID NO: 1640 - DNA, 48 bp, Artificial sequence
  Synthetic
gcctccctcgcgccatcagggaaccttcatgctgcctcccgtaggagt

SEQ ID NO: 1641 - DNA, 8 bp, Artificial sequence
  Synthetic
ggaacgat

SEQ ID NO: 1642 - DNA, 48 bp, Artificial sequence
  Synthetic
gcctccctcgcgccatcagggaacgatcatgctgcctcccgtaggagt

SEQ ID NO: 1643 - DNA, 8 bp, Artificial sequence
  Synthetic
ggaacgta

SEQ ID NO: 1644 - DNA, 48 bp, Artificial sequence
  Synthetic
gcctccctcgcgccatcagggaacgtacatgctgcctcccgtaggagt

SEQ ID NO: 1645 - DNA, 8 bp, Artificial sequence
  Synthetic
ggaagcat

SEQ ID NO: 1646 - DNA, 48 bp, Artificial sequence
  Synthetic
gcctccctcgcgccatcagggaagcatcatgctgcctcccgtaggagt

SEQ ID NO: 1647 - DNA, 8 bp, Artificial sequence
  Synthetic
ggaagcta

SEQ ID NO: 1648 - DNA, 48 bp, Artificial sequence
  Synthetic
gcctccctcgcgccatcagggaagctacatgctgcctcccgtaggagt

SEQ ID NO: 1649 - DNA, 8 bp, Artificial sequence
  Synthetic
ggaaggaa

SEQ ID NO: 1650 - DNA, 48 bp, Artificial sequence
  Synthetic
gcctccctcgcgccatcagggaaggaacatgctgcctcccgtaggagt

SEQ ID NO: 1651 - DNA, 8 bp, Artificial sequence
  Synthetic
ggaaggtt

SEQ ID NO: 1652 - DNA, 48 bp, Artificial sequence
  Synthetic
gcctccctcgcgccatcagggaaggttcatgctgcctcccgtaggagt

SEQ ID NO: 1653 - DNA, 8 bp, Artificial sequence
  Synthetic
ggaatacg

SEQ ID NO: 1654 - DNA, 48 bp, Artificial sequence
  Synthetic
gcctccctcgcgccatcagggaatacgcatgctgcctcccgtaggagt

SEQ ID NO: 1655 - DNA, 8 bp, Artificial sequence
  Synthetic
ggaatagc

SEQ ID NO: 1656 - DNA, 48 bp, Artificial sequence
  Synthetic
gcctccctcgcgccatcagggaatagccatgctgcctcccgtaggagt

SEQ ID NO: 1657 - DNA, 8 bp, Artificial sequence
  Synthetic
ggaattcc

SEQ ID NO: 1658 - DNA, 48 bp, Artificial sequence
  Synthetic
gcctccctcgcgccatcagggaattcccatgctgcctcccgtaggagt

SEQ ID NO: 1659 - DNA, 8 bp, Artificial sequence
  Synthetic
ggaattgg

SEQ ID NO: 1660 - DNA, 48 bp, Artificial sequence
  Synthetic
gcctccctcgcgccatcagggaattggcatgctgcctcccgtaggagt

SEQ ID NO: 1661 - DNA, 8 bp, Artificial sequence
  Synthetic
ggataacg

SEQ ID NO: 1662 - DNA, 48 bp, Artificial sequence
  Synthetic
gcctccctcgcgccatcagggataacgcatgctgcctcccgtaggagt

SEQ ID NO: 1663 - DNA, 8 bp, Artificial sequence
  Synthetic
ggataagc

SEQ ID NO: 1664 - DNA, 48 bp, Artificial sequence
  Synthetic
gcctccctcgcgccatcagggataagccatgctgcctcccgtaggagt

SEQ ID NO: 1665 - DNA, 8 bp, Artificial sequence
  Synthetic
ggatatcc

SEQ ID NO: 1666 - DNA, 48 bp, Artificial sequence
  Synthetic
gcctccctcgcgccatcagggatatcccatgctgcctcccgtaggagt

SEQ ID NO: 1667 - DNA, 8 bp, Artificial sequence
  Synthetic
ggatatgg

SEQ ID NO: 1668 - DNA, 48 bp, Artificial sequence
  Synthetic
gcctccctcgcgccatcagggatatggcatgctgcctcccgtaggagt

SEQ ID NO: 1669 - DNA, 8 bp, Artificial sequence
  Synthetic
ggatccat

SEQ ID NO: 1670 - DNA, 48 bp, Artificial sequence
  Synthetic
gcctccctcgcgccatcagggatccatcatgctgcctcccgtaggagt

SEQ ID NO: 1671 - DNA, 8 bp, Artificial sequence
  Synthetic
ggatccta

SEQ ID NO: 1672 - DNA, 48 bp, Artificial sequence
  Synthetic
gcctccctcgcgccatcagggatcctacatgctgcctcccgtaggagt

SEQ ID NO: 1673 - DNA, 8 bp, Artificial sequence
  Synthetic
ggatcgaa

SEQ ID NO: 1674 - DNA, 48 bp, Artificial sequence
  Synthetic
gcctccctcgcgccatcagggatcgaacatgctgcctcccgtaggagt

SEQ ID NO: 1675 - DNA, 8 bp, Artificial sequence
  Synthetic
ggatcgtt

SEQ ID NO: 1676 - DNA, 48 bp, Artificial sequence
  Synthetic
gcctccctcgcgccatcagggatcgttcatgctgcctcccgtaggagt

SEQ ID NO: 1677 - DNA, 8 bp, Artificial sequence
  Synthetic
ggatgcaa

SEQ ID NO: 1678 - DNA, 48 bp, Artificial sequence
  Synthetic
gcctccctcgcgccatcagggatgcaacatgctgcctcccgtaggagt

SEQ ID NO: 1679 - DNA, 8 bp, Artificial sequence
  Synthetic
ggatgctt

SEQ ID NO: 1680 - DNA, 48 bp, Artificial sequence
  Synthetic
gcctccctcgcgccatcagggatgcttcatgctgcctcccgtaggagt

SEQ ID NO: 1681 - DNA, 8 bp, Artificial sequence
  Synthetic
ggatggat

SEQ ID NO: 1682 - DNA, 48 bp, Artificial sequence
  Synthetic
gcctccctcgcgccatcagggatggatcatgctgcctcccgtaggagt

SEQ ID NO: 1683 - DNA, 8 bp, Artificial sequence
  Synthetic
ggatggta

SEQ ID NO: 1684 - DNA, 48 bp, Artificial sequence
  Synthetic
gcctccctcgcgccatcagggatggtacatgctgcctcccgtaggagt

SEQ ID NO: 1685 - DNA, 8 bp, Artificial sequence
  Synthetic
ggattacc

SEQ ID NO: 1686 - DNA, 48 bp, Artificial sequence
  Synthetic
gcctccctcgcgccatcagggattacccatgctgcctcccgtaggagt

SEQ ID NO: 1687 - DNA, 8 bp, Artificial sequence
  Synthetic
ggattagg

SEQ ID NO: 1688 - DNA, 48 bp, Artificial sequence
  Synthetic
gcctccctcgcgccatcagggattaggcatgctgcctcccgtaggagt

SEQ ID NO: 1689 - DNA, 8 bp, Artificial sequence
  Synthetic
ggccaatt

SEQ ID NO: 1690 - DNA, 48 bp, Artificial sequence
  Synthetic
gcctccctcgcgccatcagggccaattcatgctgcctcccgtaggagt

SEQ ID NO: 1691 - DNA, 8 bp, Artificial sequence
  Synthetic
ggccatat

SEQ ID NO: 1692 - DNA, 48 bp, Artificial sequence
  Synthetic
gcctccctcgcgccatcagggccatatcatgctgcctcccgtaggagt

SEQ ID NO: 1693 - DNA, 8 bp, Artificial sequence
  Synthetic
ggccatta

SEQ ID NO: 1694 - DNA, 48 bp, Artificial sequence
  Synthetic
gcctccctcgcgccatcagggccattacatgctgcctcccgtaggagt

SEQ ID NO: 1695 - DNA, 8 bp, Artificial sequence
  Synthetic
ggcctaat

SEQ ID NO: 1696 - DNA, 48 bp, Artificial sequence
  Synthetic
gcctccctcgcgccatcagggcctaatcatgctgcctcccgtaggagt

SEQ ID NO: 1697 - DNA, 8 bp, Artificial sequence
  Synthetic
ggcctata

SEQ ID NO: 1698 - DNA, 48 bp, Artificial sequence
  Synthetic
gcctccctcgcgccatcagggcctatacatgctgcctcccgtaggagt

SEQ ID NO: 1699 - DNA, 8 bp, Artificial sequence
  Synthetic
ggccttaa

SEQ ID NO: 1700 - DNA, 48 bp, Artificial sequence
  Synthetic
gcctccctcgcgccatcagggccttaacatgctgcctcccgtaggagt

SEQ ID NO: 1701 - DNA, 8 bp, Artificial sequence
  Synthetic
ggcgaata

SEQ ID NO: 1702 - DNA, 48 bp, Artificial sequence
  Synthetic
gcctccctcgcgccatcagggcgaatacatgctgcctcccgtaggagt

SEQ ID NO: 1703 - DNA, 8 bp, Artificial sequence
  Synthetic
ggcgataa

SEQ ID NO: 1704 - DNA, 48 bp, Artificial sequence
  Synthetic
gcctccctcgcgccatcagggcgataacatgctgcctcccgtaggagt

SEQ ID NO: 1705 - DNA, 8 bp, Artificial sequence
  Synthetic
ggcgtatt

SEQ ID NO: 1706 - DNA, 48 bp, Artificial sequence
  Synthetic
gcctccctcgcgccatcagggcgtattcatgctgcctcccgtaggagt

SEQ ID NO: 1707 - DNA, 8 bp, Artificial sequence
  Synthetic
ggcgttat

SEQ ID NO: 1708 - DNA, 48 bp, Artificial sequence
  Synthetic
gcctccctcgcgccatcagggcgttatcatgctgcctcccgtaggagt

SEQ ID NO: 1709 - DNA, 8 bp, Artificial sequence
  Synthetic
ggtaatcc

SEQ ID NO: 1710 - DNA, 48 bp, Artificial sequence
  Synthetic
gcctccctcgcgccatcagggtaatcccatgctgcctcccgtaggagt

SEQ ID NO: 1711 - DNA, 8 bp, Artificial sequence
  Synthetic
ggtaatgg

SEQ ID NO: 1712 - DNA, 48 bp, Artificial sequence
  Synthetic
gcctccctcgcgccatcagggtaatggcatgctgcctcccgtaggagt

SEQ ID NO: 1713 - DNA, 8 bp, Artificial sequence
  Synthetic
ggtaccat

SEQ ID NO: 1714 - DNA, 48 bp, Artificial sequence
  Synthetic
gcctccctcgcgccatcagggtaccatcatgctgcctcccgtaggagt

SEQ ID NO: 1715 - DNA, 8 bp, Artificial sequence
  Synthetic
ggtaccta

SEQ ID NO: 1716 - DNA, 48 bp, Artificial sequence
  Synthetic
gcctccctcgcgccatcagggtacctacatgctgcctcccgtaggagt

SEQ ID NO: 1717 - DNA, 8 bp, Artificial sequence
  Synthetic
ggtacgaa

SEQ ID NO: 1718 - DNA, 48 bp, Artificial sequence
  Synthetic
gcctccctcgcgccatcagggtacgaacatgctgcctcccgtaggagt

SEQ ID NO: 1719 - DNA, 8 bp, Artificial sequence
  Synthetic
ggtacgtt

SEQ ID NO: 1720 - DNA, 48 bp, Artificial sequence
  Synthetic
gcctccctcgcgccatcagggtacgttcatgctgcctcccgtaggagt

SEQ ID NO: 1721 - DNA, 8 bp, Artificial sequence
  Synthetic
ggtagcaa

SEQ ID NO: 1722 - DNA, 48 bp, Artificial sequence
  Synthetic
gcctccctcgcgccatcagggtagcaacatgctgcctcccgtaggagt

SEQ ID NO: 1723 - DNA, 8 bp, Artificial sequence
  Synthetic
ggtagctt

SEQ ID NO: 1724 - DNA, 48 bp, Artificial sequence
  Synthetic
gcctccctcgcgccatcagggtagcttcatgctgcctcccgtaggagt

SEQ ID NO: 1725 - DNA, 8 bp, Artificial sequence
  Synthetic
ggtaggat

SEQ ID NO: 1726 - DNA, 48 bp, Artificial sequence
  Synthetic
gcctccctcgcgccatcagggtaggatcatgctgcctcccgtaggagt

SEQ ID NO: 1727 - DNA, 8 bp, Artificial sequence
  Synthetic
ggtaggta

SEQ ID NO: 1728 - DNA, 48 bp, Artificial sequence
  Synthetic
gcctccctcgcgccatcagggtaggtacatgctgcctcccgtaggagt

SEQ ID NO: 1729 - DNA, 8 bp, Artificial sequence
  Synthetic
ggtatacc

SEQ ID NO: 1730 - DNA, 48 bp, Artificial sequence
  Synthetic
gcctccctcgcgccatcagggtatacccatgctgcctcccgtaggagt

SEQ ID NO: 1731 - DNA, 8 bp, Artificial sequence
  Synthetic
ggtatagg

SEQ ID NO: 1732 - DNA, 48 bp, Artificial sequence
  Synthetic
gcctccctcgcgccatcagggtataggcatgctgcctcccgtaggagt

SEQ ID NO: 1733 - DNA, 8 bp, Artificial sequence
  Synthetic
ggtattcg

SEQ ID NO: 1734 - DNA, 48 bp, Artificial sequence
  Synthetic
gcctccctcgcgccatcagggtattcgcatgctgcctcccgtaggagt

SEQ ID NO: 1735 - DNA, 8 bp, Artificial sequence
  Synthetic
ggtattgc

SEQ ID NO: 1736 - DNA, 48 bp, Artificial sequence
  Synthetic
gcctccctcgcgccatcagggtattgccatgctgcctcccgtaggagt

SEQ ID NO: 1737 - DNA, 8 bp, Artificial sequence
  Synthetic
ggttaacc

SEQ ID NO: 1738 - DNA, 48 bp, Artificial sequence
  Synthetic
gcctccctcgcgccatcagggttaacccatgctgcctcccgtaggagt

SEQ ID NO: 1739 - DNA, 8 bp, Artificial sequence
  Synthetic
ggttaagg

SEQ ID NO: 1740 - DNA, 48 bp, Artificial sequence
  Synthetic
gcctccctcgcgccatcagggttaaggcatgctgcctcccgtaggagt

SEQ ID NO: 1741 - DNA, 8 bp, Artificial sequence
  Synthetic
ggttatcg

SEQ ID NO: 1742 - DNA, 48 bp, Artificial sequence
  Synthetic
gcctccctcgcgccatcagggttatcgcatgctgcctcccgtaggagt

SEQ ID NO: 1743 - DNA, 8 bp, Artificial sequence
  Synthetic
ggttatgc

SEQ ID NO: 1744 - DNA, 48 bp, Artificial sequence
  Synthetic
gcctccctcgcgccatcagggttatgccatgctgcctcccgtaggagt

SEQ ID NO: 1745 - DNA, 8 bp, Artificial sequence
  Synthetic
ggttccaa

SEQ ID NO: 1746 - DNA, 48 bp, Artificial sequence
  Synthetic
gcctccctcgcgccatcagggttccaacatgctgcctcccgtaggagt

SEQ ID NO: 1747 - DNA, 8 bp, Artificial sequence
  Synthetic
ggttcctt

SEQ ID NO: 1748 - DNA, 48 bp, Artificial sequence
  Synthetic
gcctccctcgcgccatcagggttccttcatgctgcctcccgtaggagt

SEQ ID NO: 1749 - DNA, 8 bp, Artificial sequence
  Synthetic
ggttcgat

SEQ ID NO: 1750 - DNA, 48 bp, Artificial sequence
  Synthetic
gcctccctcgcgccatcagggttcgatcatgctgcctcccgtaggagt

SEQ ID NO: 1751 - DNA, 8 bp, Artificial sequence
  Synthetic
ggttcgta

SEQ ID NO: 1752 - DNA, 48 bp, Artificial sequence
  Synthetic
gcctccctcgcgccatcagggttcgtacatgctgcctcccgtaggagt

SEQ ID NO: 1753 - DNA, 8 bp, Artificial sequence
  Synthetic
ggttgcat

SEQ ID NO: 1754 - DNA, 48 bp, Artificial sequence
  Synthetic
gcctccctcgcgccatcagggttgcatcatgctgcctcccgtaggagt

SEQ ID NO: 1755 - DNA, 8 bp, Artificial sequence
  Synthetic
ggttgcta

SEQ ID NO: 1756 - DNA, 48 bp, Artificial sequence
  Synthetic
gcctccctcgcgccatcagggttgctacatgctgcctcccgtaggagt

SEQ ID NO: 1757 - DNA, 8 bp, Artificial sequence
  Synthetic
ggttggaa

SEQ ID NO: 1758 - DNA, 48 bp, Artificial sequence
  Synthetic
gcctccctcgcgccatcagggttggaacatgctgcctcccgtaggagt

SEQ ID NO: 1759 - DNA, 8 bp, Artificial sequence
  Synthetic
ggttggtt

SEQ ID NO: 1760 - DNA, 48 bp, Artificial sequence
  Synthetic
gcctccctcgcgccatcagggttggttcatgctgcctcccgtaggagt

SEQ ID NO: 1761 - DNA, 8 bp, Artificial sequence
  Synthetic
gtacacca

SEQ ID NO: 1762 - DNA, 48 bp, Artificial sequence
  Synthetic
gcctccctcgcgccatcaggtacaccacatgctgcctcccgtaggagt

SEQ ID NO: 1763 - DNA, 8 bp, Artificial sequence
  Synthetic
gtacacgt

SEQ ID NO: 1764 - DNA, 48 bp, Artificial sequence
  Synthetic
gcctccctcgcgccatcaggtacacgtcatgctgcctcccgtaggagt

SEQ ID NO: 1765 - DNA, 8 bp, Artificial sequence
  Synthetic
gtacagct

SEQ ID NO: 1766 - DNA, 48 bp, Artificial sequence
  Synthetic
gcctccctcgcgccatcaggtacagctcatgctgcctcccgtaggagt

SEQ ID NO: 1767 - DNA, 8 bp, Artificial sequence
  Synthetic
gtacagga

SEQ ID NO: 1768 - DNA, 48 bp, Artificial sequence
  Synthetic
gcctccctcgcgccatcaggtacaggacatgctgcctcccgtaggagt

SEQ ID NO: 1769 - DNA, 8 bp, Artificial sequence
  Synthetic
gtaccaac

SEQ ID NO: 1770 - DNA, 48 bp, Artificial sequence
  Synthetic
gcctccctcgcgccatcaggtaccaaccatgctgcctcccgtaggagt

SEQ ID NO: 1771 - DNA, 8 bp, Artificial sequence
  Synthetic
gtaccatg

SEQ ID NO: 1772 - DNA, 48 bp, Artificial sequence
  Synthetic
gcctccctcgcgccatcaggtaccatgcatgctgcctcccgtaggagt

SEQ ID NO: 1773 - DNA, 8 bp, Artificial sequence
  Synthetic
gtacctag

SEQ ID NO: 1774 - DNA, 48 bp, Artificial sequence
  Synthetic
gcctccctcgcgccatcaggtacctagcatgctgcctcccgtaggagt

SEQ ID NO: 1775 - DNA, 8 bp, Artificial sequence
  Synthetic
gtaccttc

SEQ ID NO: 1776 - DNA, 48 bp, Artificial sequence
  Synthetic
gcctccctcgcgccatcaggtaccttccatgctgcctcccgtaggagt

SEQ ID NO: 1777 - DNA, 8 bp, Artificial sequence
  Synthetic
gtacgaag

SEQ ID NO: 1778 - DNA, 48 bp, Artificial sequence
  Synthetic
gcctccctcgcgccatcaggtacgaagcatgctgcctcccgtaggagt

SEQ ID NO: 1779 - DNA, 8 bp, Artificial sequence
  Synthetic
gtacgatc

SEQ ID NO: 1780 - DNA, 48 bp, Artificial sequence
  Synthetic
gcctccctcgcgccatcaggtacgatccatgctgcctcccgtaggagt

SEQ ID NO: 1781 - DNA, 8 bp, Artificial sequence
  Synthetic
gtacgtac

SEQ ID NO: 1782 - DNA, 48 bp, Artificial sequence
  Synthetic
gcctccctcgcgccatcaggtacgtaccatgctgcctcccgtaggagt

SEQ ID NO: 1783 - DNA, 8 bp, Artificial sequence
  Synthetic
gtacgttg

SEQ ID NO: 1784 - DNA, 48 bp, Artificial sequence
  Synthetic
gcctccctcgcgccatcaggtacgttgcatgctgcctcccgtaggagt

SEQ ID NO: 1785 - DNA, 8 bp, Artificial sequence
  Synthetic
gtactcct

SEQ ID NO: 1786 - DNA, 48 bp, Artificial sequence
  Synthetic
gcctccctcgcgccatcaggtactcctcatgctgcctcccgtaggagt

SEQ ID NO: 1787 - DNA, 8 bp, Artificial sequence
  Synthetic
gtactcga

SEQ ID NO: 1788 - DNA, 48 bp, Artificial sequence
  Synthetic
gcctccctcgcgccatcaggtactcgacatgctgcctcccgtaggagt

SEQ ID NO: 1789 - DNA, 8 bp, Artificial sequence
  Synthetic
gtactgca

SEQ ID NO: 1790 - DNA, 48 bp, Artificial sequence
  Synthetic
gcctccctcgcgccatcaggtactgcacatgctgcctcccgtaggagt

SEQ ID NO: 1791 - DNA, 8 bp, Artificial sequence
  Synthetic
gtactggt

SEQ ID NO: 1792 - DNA, 48 bp, Artificial sequence
  Synthetic
gcctccctcgcgccatcaggtactggtcatgctgcctcccgtaggagt

SEQ ID NO: 1793 - DNA, 8 bp, Artificial sequence
  Synthetic
gtagacct

SEQ ID NO: 1794 - DNA, 48 bp, Artificial sequence
  Synthetic
gcctccctcgcgccatcaggtagacctcatgctgcctcccgtaggagt

SEQ ID NO: 1795 - DNA, 8 bp, Artificial sequence
  Synthetic
gtagacga

SEQ ID NO: 1796 - DNA, 48 bp, Artificial sequence
  Synthetic
gcctccctcgcgccatcaggtagacgacatgctgcctcccgtaggagt

SEQ ID NO: 1797 - DNA, 8 bp, Artificial sequence
  Synthetic
gtagagca

SEQ ID NO: 1798 - DNA, 48 bp, Artificial sequence
  Synthetic
gcctccctcgcgccatcaggtagagcacatgctgcctcccgtaggagt

SEQ ID NO: 1799 - DNA, 8 bp, Artificial sequence
  Synthetic
gtagaggt

SEQ ID NO: 1800 - DNA, 48 bp, Artificial sequence
  Synthetic
gcctccctcgcgccatcaggtagaggtcatgctgcctcccgtaggagt

SEQ ID NO: 1801 - DNA, 8 bp, Artificial sequence
  Synthetic
gtagcaag

SEQ ID NO: 1802 - DNA, 48 bp, Artificial sequence
  Synthetic
gcctccctcgcgccatcaggtagcaagcatgctgcctcccgtaggagt

SEQ ID NO: 1803 - DNA, 8 bp, Artificial sequence
  Synthetic
gtagcatc

SEQ ID NO: 1804 - DNA, 48 bp, Artificial sequence
  Synthetic
gcctccctcgcgccatcaggtagcatccatgctgcctcccgtaggagt

SEQ ID NO: 1805 - DNA, 8 bp, Artificial sequence
  Synthetic
gtagctac

SEQ ID NO: 1806 - DNA, 48 bp, Artificial sequence
  Synthetic
gcctccctcgcgccatcaggtagctaccatgctgcctcccgtaggagt

SEQ ID NO: 1807 - DNA, 8 bp, Artificial sequence
  Synthetic
gtagcttg

SEQ ID NO: 1808 - DNA, 48 bp, Artificial sequence
  Synthetic
gcctccctcgcgccatcaggtagcttgcatgctgcctcccgtaggagt

SEQ ID NO: 1809 - DNA, 8 bp, Artificial sequence
  Synthetic
gtaggaac

SEQ ID NO: 1810 - DNA, 48 bp, Artificial sequence
  Synthetic
gcctccctcgcgccatcaggtaggaaccatgctgcctcccgtaggagt

SEQ ID NO: 1811 - DNA, 8 bp, Artificial sequence
  Synthetic
gtaggatg

SEQ ID NO: 1812 - DNA, 48 bp, Artificial sequence
  Synthetic
gcctccctcgcgccatcaggtaggatgcatgctgcctcccgtaggagt

SEQ ID NO: 1813 - DNA, 8 bp, Artificial sequence
  Synthetic
gtaggtag

SEQ ID NO: 1814 - DNA, 48 bp, Artificial sequence
  Synthetic
gcctccctcgcgccatcaggtaggtagcatgctgcctcccgtaggagt

SEQ ID NO: 1815 - DNA, 8 bp, Artificial sequence
  Synthetic
gtaggttc

SEQ ID NO: 1816 - DNA, 48 bp, Artificial sequence
  Synthetic
gcctccctcgcgccatcaggtaggttccatgctgcctcccgtaggagt

SEQ ID NO: 1817 - DNA, 8 bp, Artificial sequence
  Synthetic
gtagtcca

SEQ ID NO: 1818 - DNA, 48 bp, Artificial sequence
  Synthetic
gcctccctcgcgccatcaggtagtccacatgctgcctcccgtaggagt

SEQ ID NO: 1819 - DNA, 8 bp, Artificial sequence
  Synthetic
gtagtcgt

SEQ ID NO: 1820 - DNA, 48 bp, Artificial sequence
  Synthetic
gcctccctcgcgccatcaggtagtcgtcatgctgcctcccgtaggagt

SEQ ID NO: 1821 - DNA, 8 bp, Artificial sequence
  Synthetic
gtagtgct

SEQ ID NO: 1822 - DNA, 48 bp, Artificial sequence
  Synthetic
gcctccctcgcgccatcaggtagtgctcatgctgcctcccgtaggagt

SEQ ID NO: 1823 - DNA, 8 bp, Artificial sequence
  Synthetic
gtagtgga

SEQ ID NO: 1824 - DNA, 48 bp, Artificial sequence
  Synthetic
gcctccctcgcgccatcaggtagtggacatgctgcctcccgtaggagt

SEQ ID NO: 1825 - DNA, 8 bp, Artificial sequence
  Synthetic
gtcaacac

SEQ ID NO: 1826 - DNA, 48 bp, Artificial sequence
  Synthetic
gcctccctcgcgccatcaggtcaacaccatgctgcctcccgtaggagt

SEQ ID NO: 1827 - DNA, 8 bp, Artificial sequence
  Synthetic
gtcaactg

SEQ ID NO: 1828 - DNA, 48 bp, Artificial sequence
  Synthetic
gcctccctcgcgccatcaggtcaactgcatgctgcctcccgtaggagt

SEQ ID NO: 1829 - DNA, 8 bp, Artificial sequence
  Synthetic
gtcaagag

SEQ ID NO: 1830 - DNA, 48 bp, Artificial sequence
  Synthetic
gcctccctcgcgccatcaggtcaagagcatgctgcctcccgtaggagt

SEQ ID NO: 1831 - DNA, 8 bp, Artificial sequence
  Synthetic
gtcaagtc

SEQ ID NO: 1832 - DNA, 48 bp, Artificial sequence
  Synthetic
gcctccctcgcgccatcaggtcaagtccatgctgcctcccgtaggagt

SEQ ID NO: 1833 - DNA, 8 bp, Artificial sequence
  Synthetic
gtcacaca

SEQ ID NO: 1834 - DNA, 48 bp, Artificial sequence
  Synthetic
gcctccctcgcgccatcaggtcacacacatgctgcctcccgtaggagt

SEQ ID NO: 1835 - DNA, 8 bp, Artificial sequence
  Synthetic
gtcacagt

SEQ ID NO: 1836 - DNA, 48 bp, Artificial sequence
  Synthetic
gcctccctcgcgccatcaggtcacagtcatgctgcctcccgtaggagt

SEQ ID NO: 1837 - DNA, 8 bp, Artificial sequence
  Synthetic
gtcactct

SEQ ID NO: 1838 - DNA, 48 bp, Artificial sequence
  Synthetic
gcctccctcgcgccatcaggtcactctcatgctgcctcccgtaggagt

SEQ ID NO: 1839 - DNA, 8 bp, Artificial sequence
  Synthetic
gtcactga

SEQ ID NO: 1840 - DNA, 48 bp, Artificial sequence
  Synthetic
gcctccctcgcgccatcaggtcactgacatgctgcctcccgtaggagt

SEQ ID NO: 1841 - DNA, 8 bp, Artificial sequence
  Synthetic
gtcagact

SEQ ID NO: 1842 - DNA, 48 bp, Artificial sequence
  Synthetic
gcctccctcgcgccatcaggtcagactcatgctgcctcccgtaggagt

SEQ ID NO: 1843 - DNA, 8 bp, Artificial sequence
  Synthetic
gtcagaga

SEQ ID NO: 1844 - DNA, 48 bp, Artificial sequence
  Synthetic
gcctccctcgcgccatcaggtcagagacatgctgcctcccgtaggagt

SEQ ID NO: 1845 - DNA, 8 bp, Artificial sequence
  Synthetic
gtcagtca

SEQ ID NO: 1846 - DNA, 48 bp, Artificial sequence
  Synthetic
gcctccctcgcgccatcaggtcagtcacatgctgcctcccgtaggagt

SEQ ID NO: 1847 - DNA, 8 bp, Artificial sequence
  Synthetic
gtcagtgt

SEQ ID NO: 1848 - DNA, 48 bp, Artificial sequence
  Synthetic
gcctccctcgcgccatcaggtcagtgtcatgctgcctcccgtaggagt

SEQ ID NO: 1849 - DNA, 8 bp, Artificial sequence
  Synthetic
gtcatcag

SEQ ID NO: 1850 - DNA, 48 bp, Artificial sequence
  Synthetic
gcctccctcgcgccatcaggtcatcagcatgctgcctcccgtaggagt

SEQ ID NO: 1851 - DNA, 8 bp, Artificial sequence
  Synthetic
gtcatctc

SEQ ID NO: 1852 - DNA, 48 bp, Artificial sequence
  Synthetic
gcctccctcgcgccatcaggtcatctccatgctgcctcccgtaggagt

SEQ ID NO: 1853 - DNA, 8 bp, Artificial sequence
  Synthetic
gtcatgac

SEQ ID NO: 1854 - DNA, 48 bp, Artificial sequence
  Synthetic
gcctccctcgcgccatcaggtcatgaccatgctgcctcccgtaggagt

SEQ ID NO: 1855 - DNA, 8 bp, Artificial sequence
  Synthetic
gtcatgtg

SEQ ID NO: 1856 - DNA, 48 bp, Artificial sequence
  Synthetic
gcctccctcgcgccatcaggtcatgtgcatgctgcctcccgtaggagt

SEQ ID NO: 1857 - DNA, 8 bp, Artificial sequence
  Synthetic
gtctacag

SEQ ID NO: 1858 - DNA, 48 bp, Artificial sequence
  Synthetic
gcctccctcgcgccatcaggtctacagcatgctgcctcccgtaggagt

SEQ ID NO: 1859 - DNA, 8 bp, Artificial sequence
  Synthetic
gtctactc

SEQ ID NO: 1860 - DNA, 48 bp, Artificial sequence
  Synthetic
gcctccctcgcgccatcaggtctactccatgctgcctcccgtaggagt

SEQ ID NO: 1861 - DNA, 8 bp, Artificial sequence
  Synthetic
gtctagac

SEQ ID NO: 1862 - DNA, 48 bp, Artificial sequence
  Synthetic
gcctccctcgcgccatcaggtctagaccatgctgcctcccgtaggagt

SEQ ID NO: 1863 - DNA, 8 bp, Artificial sequence
  Synthetic
gtctagtg

SEQ ID NO: 1864 - DNA, 48 bp, Artificial sequence
  Synthetic
gcctccctcgcgccatcaggtctagtgcatgctgcctcccgtaggagt

SEQ ID NO: 1865 - DNA, 8 bp, Artificial sequence
  Synthetic
gtctcact

SEQ ID NO: 1866 - DNA, 48 bp, Artificial sequence
  Synthetic
gcctccctcgcgccatcaggtctcactcatgctgcctcccgtaggagt

SEQ ID NO: 1867 - DNA, 8 bp, Artificial sequence
  Synthetic
gtctcaga

SEQ ID NO: 1868 - DNA, 48 bp, Artificial sequence
  Synthetic
gcctccctcgcgccatcaggtctcagacatgctgcctcccgtaggagt

SEQ ID NO: 1869 - DNA, 8 bp, Artificial sequence
  Synthetic
gtctctca

SEQ ID NO: 1870 - DNA, 48 bp, Artificial sequence
  Synthetic
gcctccctcgcgccatcaggtctctcacatgctgcctcccgtaggagt

SEQ ID NO: 1871 - DNA, 8 bp, Artificial sequence
  Synthetic
gtctctgt

SEQ ID NO: 1872 - DNA, 48 bp, Artificial sequence
  Synthetic
gcctccctcgcgccatcaggtctctgtcatgctgcctcccgtaggagt

SEQ ID NO: 1873 - DNA, 8 bp, Artificial sequence
  Synthetic
gtctgaca

SEQ ID NO: 1874 - DNA, 48 bp, Artificial sequence
  Synthetic
gcctccctcgcgccatcaggtctgacacatgctgcctcccgtaggagt

SEQ ID NO: 1875 - DNA, 8 bp, Artificial sequence
  Synthetic
gtctgagt

SEQ ID NO: 1876 - DNA, 48 bp, Artificial sequence
  Synthetic
gcctccctcgcgccatcaggtctgagtcatgctgcctcccgtaggagt

SEQ ID NO: 1877 - DNA, 8 bp, Artificial sequence
  Synthetic
gtctgtct

SEQ ID NO: 1878 - DNA, 48 bp, Artificial sequence
  Synthetic
gcctccctcgcgccatcaggtctgtctcatgctgcctcccgtaggagt

SEQ ID NO: 1879 - DNA, 8 bp, Artificial sequence
  Synthetic
gtctgtga

SEQ ID NO: 1880 - DNA, 48 bp, Artificial sequence
  Synthetic
gcctccctcgcgccatcaggtctgtgacatgctgcctcccgtaggagt

SEQ ID NO: 1881 - DNA, 8 bp, Artificial sequence
  Synthetic
gtcttcac

SEQ ID NO: 1882 - DNA, 48 bp, Artificial sequence
  Synthetic
gcctccctcgcgccatcaggtcttcaccatgctgcctcccgtaggagt

SEQ ID NO: 1883 - DNA, 8 bp, Artificial sequence
  Synthetic
gtcttctg

SEQ ID NO: 1884 - DNA, 48 bp, Artificial sequence
  Synthetic
gcctccctcgcgccatcaggtcttctgcatgctgcctcccgtaggagt

SEQ ID NO: 1885 - DNA, 8 bp, Artificial sequence
  Synthetic
gtcttgag

SEQ ID NO: 1886 - DNA, 48 bp, Artificial sequence
  Synthetic
gcctccctcgcgccatcaggtcttgagcatgctgcctcccgtaggagt

SEQ ID NO: 1887 - DNA, 8 bp, Artificial sequence
  Synthetic
gtcttgtc

SEQ ID NO: 1888 - DNA, 48 bp, Artificial sequence
  Synthetic
gcctccctcgcgccatcaggtcttgtccatgctgcctcccgtaggagt

SEQ ID NO: 1889 - DNA, 8 bp, Artificial sequence
  Synthetic
gtgaacag

SEQ ID NO: 1890 - DNA, 48 bp, Artificial sequence
  Synthetic
gcctccctcgcgccatcaggtgaacagcatgctgcctcccgtaggagt

SEQ ID NO: 1891 - DNA, 8 bp, Artificial sequence
  Synthetic
gtgaactc

SEQ ID NO: 1892 - DNA, 48 bp, Artificial sequence
  Synthetic
gcctccctcgcgccatcaggtgaactccatgctgcctcccgtaggagt

SEQ ID NO: 1893 - DNA, 8 bp, Artificial sequence
  Synthetic
gtgaagac

SEQ ID NO: 1894 - DNA, 48 bp, Artificial sequence
  Synthetic
gcctccctcgcgccatcaggtgaagaccatgctgcctcccgtaggagt

SEQ ID NO: 1895 - DNA, 8 bp, Artificial sequence
  Synthetic
gtgaagtg

SEQ ID NO: 1896 - DNA, 48 bp, Artificial sequence
  Synthetic
gcctccctcgcgccatcaggtgaagtgcatgctgcctcccgtaggagt

SEQ ID NO: 1897 - DNA, 8 bp, Artificial sequence
  Synthetic
gtgacact

SEQ ID NO: 1898 - DNA, 48 bp, Artificial sequence
  Synthetic
gcctccctcgcgccatcaggtgacactcatgctgcctcccgtaggagt

SEQ ID NO: 1899 - DNA, 8 bp, Artificial sequence
  Synthetic
gtgacaga

SEQ ID NO: 1900 - DNA, 48 bp, Artificial sequence
  Synthetic
gcctccctcgcgccatcaggtgacagacatgctgcctcccgtaggagt

SEQ ID NO: 1901 - DNA, 8 bp, Artificial sequence
  Synthetic
gtgactca

SEQ ID NO: 1902 - DNA, 48 bp, Artificial sequence
  Synthetic
gcctccctcgcgccatcaggtgactcacatgctgcctcccgtaggagt

SEQ ID NO: 1903 - DNA, 8 bp, Artificial sequence
  Synthetic
gtgactgt

SEQ ID NO: 1904 - DNA, 48 bp, Artificial sequence
  Synthetic
gcctccctcgcgccatcaggtgactgtcatgctgcctcccgtaggagt

SEQ ID NO: 1905 - DNA, 8 bp, Artificial sequence
  Synthetic
gtgagaca

SEQ ID NO: 1906 - DNA, 48 bp, Artificial sequence
  Synthetic
gcctccctcgcgccatcaggtgagacacatgctgcctcccgtaggagt

SEQ ID NO: 1907 - DNA, 8 bp, Artificial sequence
  Synthetic
gtgagagt

SEQ ID NO: 1908 - DNA, 48 bp, Artificial sequence
  Synthetic
gcctccctcgcgccatcaggtgagagtcatgctgcctcccgtaggagt

SEQ ID NO: 1909 - DNA, 8 bp, Artificial sequence
  Synthetic
gtgagtct

SEQ ID NO: 1910 - DNA, 48 bp, Artificial sequence
  Synthetic
gcctccctcgcgccatcaggtgagtctcatgctgcctcccgtaggagt

SEQ ID NO: 1911 - DNA, 8 bp, Artificial sequence
  Synthetic
gtgagtga

SEQ ID NO: 1912 - DNA, 48 bp, Artificial sequence
  Synthetic
gcctccctcgcgccatcaggtgagtgacatgctgcctcccgtaggagt

SEQ ID NO: 1913 - DNA, 8 bp, Artificial sequence
  Synthetic
gtgatcac

SEQ ID NO: 1914 - DNA, 48 bp, Artificial sequence
  Synthetic
gcctccctcgcgccatcaggtgatcaccatgctgcctcccgtaggagt

SEQ ID NO: 1915 - DNA, 8 bp, Artificial sequence
  Synthetic
gtgatctg

SEQ ID NO: 1916 - DNA, 48 bp, Artificial sequence
  Synthetic
gcctccctcgcgccatcaggtgatctgcatgctgcctcccgtaggagt

SEQ ID NO: 1917 - DNA, 8 bp, Artificial sequence
  Synthetic
gtgatgag

SEQ ID NO: 1918 - DNA, 48 bp, Artificial sequence
  Synthetic
gcctccctcgcgccatcaggtgatgagcatgctgcctcccgtaggagt

SEQ ID NO: 1919 - DNA, 8 bp, Artificial sequence
  Synthetic
gtgatgtc

SEQ ID NO: 1920 - DNA, 48 bp, Artificial sequence
  Synthetic
gcctccctcgcgccatcaggtgatgtccatgctgcctcccgtaggagt

SEQ ID NO: 1921 - DNA, 8 bp, Artificial sequence
  Synthetic
gtgtacac

SEQ ID NO: 1922 - DNA, 48 bp, Artificial sequence
  Synthetic
gcctccctcgcgccatcaggtgtacaccatgctgcctcccgtaggagt

SEQ ID NO: 1923 - DNA, 8 bp, Artificial sequence
  Synthetic
gtgtactg

SEQ ID NO: 1924 - DNA, 48 bp, Artificial sequence
  Synthetic
gcctccctcgcgccatcaggtgtactgcatgctgcctcccgtaggagt

SEQ ID NO: 1925 - DNA, 8 bp, Artificial sequence
  Synthetic
gtgtagag

SEQ ID NO: 1926 - DNA, 48 bp, Artificial sequence
  Synthetic
gcctccctcgcgccatcaggtgtagagcatgctgcctcccgtaggagt

SEQ ID NO: 1927 - DNA, 8 bp, Artificial sequence
  Synthetic
gtgtagtc

SEQ ID NO: 1928 - DNA, 48 bp, Artificial sequence
  Synthetic
gcctccctcgcgccatcaggtgtagtccatgctgcctcccgtaggagt

SEQ ID NO: 1929 - DNA, 8 bp, Artificial sequence
  Synthetic
gtgtcaca

SEQ ID NO: 1930 - DNA, 48 bp, Artificial sequence
  Synthetic
gcctccctcgcgccatcaggtgtcacacatgctgcctcccgtaggagt

SEQ ID NO: 1931 - DNA, 8 bp, Artificial sequence
  Synthetic
gtgtcagt

SEQ ID NO: 1932 - DNA, 48 bp, Artificial sequence
  Synthetic
gcctccctcgcgccatcaggtgtcagtcatgctgcctcccgtaggagt

SEQ ID NO: 1933 - DNA, 8 bp, Artificial sequence
  Synthetic
gtgtctct

SEQ ID NO: 1934 - DNA, 48 bp, Artificial sequence
  Synthetic
gcctccctcgcgccatcaggtgtctctcatgctgcctcccgtaggagt

SEQ ID NO: 1935 - DNA, 8 bp, Artificial sequence
  Synthetic
gtgtctga

SEQ ID NO: 1936 - DNA, 48 bp, Artificial sequence
  Synthetic
gcctccctcgcgccatcaggtgtctgacatgctgcctcccgtaggagt

SEQ ID NO: 1937 - DNA, 8 bp, Artificial sequence
  Synthetic
gtgtgact

SEQ ID NO: 1938 - DNA, 48 bp, Artificial sequence
  Synthetic
gcctccctcgcgccatcaggtgtgactcatgctgcctcccgtaggagt

SEQ ID NO: 1939 - DNA, 8 bp, Artificial sequence
  Synthetic
gtgtgaga

SEQ ID NO: 1940 - DNA, 48 bp, Artificial sequence
  Synthetic
gcctccctcgcgccatcaggtgtgagacatgctgcctcccgtaggagt

SEQ ID NO: 1941 - DNA, 8 bp, Artificial sequence
  Synthetic
gtgtgtca

SEQ ID NO: 1942 - DNA, 48 bp, Artificial sequence
  Synthetic
gcctccctcgcgccatcaggtgtgtcacatgctgcctcccgtaggagt

SEQ ID NO: 1943 - DNA, 8 bp, Artificial sequence
  Synthetic
gtgtgtgt

SEQ ID NO: 1944 - DNA, 48 bp, Artificial sequence
  Synthetic
gcctccctcgcgccatcaggtgtgtgtcatgctgcctcccgtaggagt

SEQ ID NO: 1945 - DNA, 8 bp, Artificial sequence
  Synthetic
gtgttcag

SEQ ID NO: 1946 - DNA, 48 bp, Artificial sequence
  Synthetic
gcctccctcgcgccatcaggtgttcagcatgctgcctcccgtaggagt

SEQ ID NO: 1947 - DNA, 8 bp, Artificial sequence
  Synthetic
gtgttctc

SEQ ID NO: 1948 - DNA, 48 bp, Artificial sequence
  Synthetic
gcctccctcgcgccatcaggtgttctccatgctgcctcccgtaggagt

SEQ ID NO: 1949 - DNA, 8 bp, Artificial sequence
  Synthetic
gtgttgac

SEQ ID NO: 1950 - DNA, 48 bp, Artificial sequence
  Synthetic
gcctccctcgcgccatcaggtgttgaccatgctgcctcccgtaggagt

SEQ ID NO: 1951 - DNA, 8 bp, Artificial sequence
  Synthetic
gtgttgtg

SEQ ID NO: 1952 - DNA, 48 bp, Artificial sequence
  Synthetic
gcctccctcgcgccatcaggtgttgtgcatgctgcctcccgtaggagt

SEQ ID NO: 1953 - DNA, 8 bp, Artificial sequence
  Synthetic
gttcacct

SEQ ID NO: 1954 - DNA, 48 bp, Artificial sequence
  Synthetic
gcctccctcgcgccatcaggttcacctcatgctgcctcccgtaggagt

SEQ ID NO: 1955 - DNA, 8 bp, Artificial sequence
  Synthetic
gttcacga

SEQ ID NO: 1956 - DNA, 48 bp, Artificial sequence
  Synthetic
gcctccctcgcgccatcaggttcacgacatgctgcctcccgtaggagt

SEQ ID NO: 1957 - DNA, 8 bp, Artificial sequence
  Synthetic
gttcagca

SEQ ID NO: 1958 - DNA, 48 bp, Artificial sequence
  Synthetic
gcctccctcgcgccatcaggttcagcacatgctgcctcccgtaggagt

SEQ ID NO: 1959 - DNA, 8 bp, Artificial sequence
  Synthetic
gttcaggt

SEQ ID NO: 1960 - DNA, 48 bp, Artificial sequence
  Synthetic
gcctccctcgcgccatcaggttcaggtcatgctgcctcccgtaggagt

SEQ ID NO: 1961 - DNA, 8 bp, Artificial sequence
  Synthetic
gttccaag

SEQ ID NO: 1962 - DNA, 48 bp, Artificial sequence
  Synthetic
gcctccctcgcgccatcaggttccaagcatgctgcctcccgtaggagt

SEQ ID NO: 1963 - DNA, 8 bp, Artificial sequence
  Synthetic
gttccatc

SEQ ID NO: 1964 - DNA, 48 bp, Artificial sequence
  Synthetic
gcctccctcgcgccatcaggttccatccatgctgcctcccgtaggagt

SEQ ID NO: 1965 - DNA, 8 bp, Artificial sequence
  Synthetic
gttcctac

SEQ ID NO: 1966 - DNA, 48 bp, Artificial sequence
  Synthetic
gcctccctcgcgccatcaggttcctaccatgctgcctcccgtaggagt

SEQ ID NO: 1967 - DNA, 8 bp, Artificial sequence
  Synthetic
gttccttg

SEQ ID NO: 1968 - DNA, 48 bp, Artificial sequence
  Synthetic
gcctccctcgcgccatcaggttccttgcatgctgcctcccgtaggagt

SEQ ID NO: 1969 - DNA, 8 bp, Artificial sequence
  Synthetic
gttcgaac

SEQ ID NO: 1970 - DNA, 48 bp, Artificial sequence
  Synthetic
gcctccctcgcgccatcaggttcgaaccatgctgcctcccgtaggagt

SEQ ID NO: 1971 - DNA, 8 bp, Artificial sequence
  Synthetic
gttcgatg

SEQ ID NO: 1972 - DNA, 48 bp, Artificial sequence
  Synthetic
gcctccctcgcgccatcaggttcgatgcatgctgcctcccgtaggagt

SEQ ID NO: 1973 - DNA, 8 bp, Artificial sequence
  Synthetic
gttcgtag

SEQ ID NO: 1974 - DNA, 48 bp, Artificial sequence
  Synthetic
gcctccctcgcgccatcaggttcgtagcatgctgcctcccgtaggagt

SEQ ID NO: 1975 - DNA, 8 bp, Artificial sequence
  Synthetic
gttcgttc

SEQ ID NO: 1976 - DNA, 48 bp, Artificial sequence
  Synthetic
gcctccctcgcgccatcaggttcgttccatgctgcctcccgtaggagt

SEQ ID NO: 1977 - DNA, 8 bp, Artificial sequence
  Synthetic
gttctcca

SEQ ID NO: 1978 - DNA, 48 bp, Artificial sequence
  Synthetic
gcctccctcgcgccatcaggttctccacatgctgcctcccgtaggagt

SEQ ID NO: 1979 - DNA, 8 bp, Artificial sequence
  Synthetic
gttctcgt

SEQ ID NO: 1980 - DNA, 48 bp, Artificial sequence
  Synthetic
gcctccctcgcgccatcaggttctcgtcatgctgcctcccgtaggagt

SEQ ID NO: 1981 - DNA, 8 bp, Artificial sequence
  Synthetic
gttctgct

SEQ ID NO: 1982 - DNA, 48 bp, Artificial sequence
  Synthetic
gcctccctcgcgccatcaggttctgctcatgctgcctcccgtaggagt

SEQ ID NO: 1983 - DNA, 8 bp, Artificial sequence
  Synthetic
gttctgga

SEQ ID NO: 1984 - DNA, 48 bp, Artificial sequence
  Synthetic
gcctccctcgcgccatcaggttctggacatgctgcctcccgtaggagt

SEQ ID NO: 1985 - DNA, 8 bp, Artificial sequence
  Synthetic
gttgacca

SEQ ID NO: 1986 - DNA, 48 bp, Artificial sequence
  Synthetic
gcctccctcgcgccatcaggttgaccacatgctgcctcccgtaggagt

SEQ ID NO: 1987 - DNA, 8 bp, Artificial sequence
  Synthetic
gttgacgt

SEQ ID NO: 1988 - DNA, 48 bp, Artificial sequence
  Synthetic
gcctccctcgcgccatcaggttgacgtcatgctgcctcccgtaggagt

SEQ ID NO: 1989 - DNA, 8 bp, Artificial sequence
  Synthetic
gttgagct

SEQ ID NO: 1990 - DNA, 48 bp, Artificial sequence
  Synthetic
gcctccctcgcgccatcaggttgagctcatgctgcctcccgtaggagt

SEQ ID NO: 1991 - DNA, 8 bp, Artificial sequence
  Synthetic
gttgagga

SEQ ID NO: 1992 - DNA, 48 bp, Artificial sequence
  Synthetic
gcctccctcgcgccatcaggttgaggacatgctgcctcccgtaggagt

SEQ ID NO: 1993 - DNA, 8 bp, Artificial sequence
  Synthetic
gttgcaac

SEQ ID NO: 1994 - DNA, 48 bp, Artificial sequence
  Synthetic
gcctccctcgcgccatcaggttgcaaccatgctgcctcccgtaggagt

SEQ ID NO: 1995 - DNA, 8 bp, Artificial sequence
  Synthetic
gttgcatg

SEQ ID NO: 1996 - DNA, 48 bp, Artificial sequence
  Synthetic
gcctccctcgcgccatcaggttgcatgcatgctgcctcccgtaggagt

SEQ ID NO: 1997 - DNA, 8 bp, Artificial sequence
  Synthetic
gttgctag

SEQ ID NO: 1998 - DNA, 48 bp, Artificial sequence
  Synthetic
gcctccctcgcgccatcaggttgctagcatgctgcctcccgtaggagt

SEQ ID NO: 1999 - DNA, 8 bp, Artificial sequence
  Synthetic
gttgcttc

SEQ ID NO: 2000 - DNA, 48 bp, Artificial sequence
  Synthetic
gcctccctcgcgccatcaggttgcttccatgctgcctcccgtaggagt

SEQ ID NO: 2001 - DNA, 8 bp, Artificial sequence
  Synthetic
gttggaag

SEQ ID NO: 2002 - DNA, 48 bp, Artificial sequence
  Synthetic
gcctccctcgcgccatcaggttggaagcatgctgcctcccgtaggagt

SEQ ID NO: 2003 - DNA, 8 bp, Artificial sequence
  Synthetic
gttggatc

SEQ ID NO: 2004 - DNA, 48 bp, Artificial sequence
  Synthetic
gcctccctcgcgccatcaggttggatccatgctgcctcccgtaggagt

SEQ ID NO: 2005 - DNA, 8 bp, Artificial sequence
  Synthetic
gttggtac

SEQ ID NO: 2006 - DNA, 48 bp, Artificial sequence
  Synthetic
gcctccctcgcgccatcaggttggtaccatgctgcctcccgtaggagt

SEQ ID NO: 2007 - DNA, 8 bp, Artificial sequence
  Synthetic
gttggttg

SEQ ID NO: 2008 - DNA, 48 bp, Artificial sequence
  Synthetic
gcctccctcgcgccatcaggttggttgcatgctgcctcccgtaggagt

SEQ ID NO: 2009 - DNA, 8 bp, Artificial sequence
  Synthetic
gttgtcct

SEQ ID NO: 2010 - DNA, 48 bp, Artificial sequence
  Synthetic
gcctccctcgcgccatcaggttgtcctcatgctgcctcccgtaggagt

SEQ ID NO: 2011 - DNA, 8 bp, Artificial sequence
  Synthetic
gttgtcga

SEQ ID NO: 2012 - DNA, 48 bp, Artificial sequence
  Synthetic
gcctccctcgcgccatcaggttgtcgacatgctgcctcccgtaggagt

SEQ ID NO: 2013 - DNA, 8 bp, Artificial sequence
  Synthetic
gttgtgca

SEQ ID NO: 2014 - DNA, 48 bp, Artificial sequence
  Synthetic
gcctccctcgcgccatcaggttgtgcacatgctgcctcccgtaggagt

SEQ ID NO: 2015 - DNA, 8 bp, Artificial sequence
  Synthetic
gttgtggt

SEQ ID NO: 2016 - DNA, 48 bp, Artificial sequence
  Synthetic
gcctccctcgcgccatcaggttgtggtcatgctgcctcccgtaggagt

SEQ ID NO: 2017 - DNA, 8 bp, Artificial sequence
  Synthetic
taatccgg

SEQ ID NO: 2018 - DNA, 48 bp, Artificial sequence
  Synthetic
gcctccctcgcgccatcagtaatccggcatgctgcctcccgtaggagt

SEQ ID NO: 2019 - DNA, 8 bp, Artificial sequence
  Synthetic
taatcgcg

SEQ ID NO: 2020 - DNA, 48 bp, Artificial sequence
  Synthetic
gcctccctcgcgccatcagtaatcgcgcatgctgcctcccgtaggagt

SEQ ID NO: 2021 - DNA, 8 bp, Artificial sequence
  Synthetic
taatcggc

SEQ ID NO: 2022 - DNA, 48 bp, Artificial sequence
  Synthetic
gcctccctcgcgccatcagtaatcggccatgctgcctcccgtaggagt

SEQ ID NO: 2023 - DNA, 8 bp, Artificial sequence
  Synthetic
taatgccg

SEQ ID NO: 2024 - DNA, 48 bp, Artificial sequence
  Synthetic
gcctccctcgcgccatcagtaatgccgcatgctgcctcccgtaggagt

SEQ ID NO: 2025 - DNA, 8 bp, Artificial sequence
  Synthetic
taatgcgc

SEQ ID NO: 2026 - DNA, 48 bp, Artificial sequence
  Synthetic
gcctccctcgcgccatcagtaatgcgccatgctgcctcccgtaggagt

SEQ ID NO: 2027 - DNA, 8 bp, Artificial sequence
  Synthetic
taatggcc

SEQ ID NO: 2028 - DNA, 48 bp, Artificial sequence
  Synthetic
gcctccctcgcgccatcagtaatggcccatgctgcctcccgtaggagt

SEQ ID NO: 2029 - DNA, 8 bp, Artificial sequence
  Synthetic
taccaacg

SEQ ID NO: 2030 - DNA, 48 bp, Artificial sequence
  Synthetic
gcctccctcgcgccatcagtaccaacgcatgctgcctcccgtaggagt

SEQ ID NO: 2031 - DNA, 8 bp, Artificial sequence
  Synthetic
taccaagc

SEQ ID NO: 2032 - DNA, 48 bp, Artificial sequence
  Synthetic
gcctccctcgcgccatcagtaccaagccatgctgcctcccgtaggagt

SEQ ID NO: 2033 - DNA, 8 bp, Artificial sequence
  Synthetic
taccatcc

SEQ ID NO: 2034 - DNA, 48 bp, Artificial sequence; identical to SEQ ID NO: 2024
  Synthetic

SEQ ID NO: 2035 - DNA, 8 bp, Artificial sequence
  Synthetic
taatgcgc

SEQ ID NO: 2036 - DNA, 48 bp, Artificial sequence; identical to SEQ ID NO: 2026
  Synthetic

SEQ ID NO: 2037 - DNA, 8 bp, Artificial sequence
  Synthetic
taatggcc

SEQ ID NO: 2038 - DNA, 48 bp, Artificial sequence; identical to SEQ ID NO: 2028
  Synthetic

SEQ ID NO: 2039 - DNA, 8 bp, Artificial sequence
  Synthetic
taccaacg

SEQ ID NO: 2040 - DNA, 48 bp, Artificial sequence; identical to SEQ ID NO: 2030
  Synthetic

SEQ ID NO: 2041 - DNA, 8 bp, Artificial sequence
  Synthetic
taccaagc

SEQ ID NO: 2042 - DNA, 48 bp, Artificial sequence; identical to SEQ ID NO: 2032
  Synthetic

SEQ ID NO: 2043 - DNA, 8 bp, Artificial sequence
  Synthetic
taccatcc

SEQ ID NO: 2044 - DNA, 48 bp, Artificial sequence
  Synthetic
gcctccctcgcgccatcagtaccatcccatgctgcctcccgtaggagt

SEQ ID NO: 2045 - DNA, 8 bp, Artificial sequence
  Synthetic
taccatgg

SEQ ID NO: 2046 - DNA, 48 bp, Artificial sequence
  Synthetic
gcctccctcgcgccatcagtaccatggcatgctgcctcccgtaggagt

SEQ ID NO: 2047 - DNA, 8 bp, Artificial sequence
  Synthetic
taccgcaa

SEQ ID NO: 2048 - DNA, 48 bp, Artificial sequence
  Synthetic
gcctccctcgcgccatcagtaccgcaacatgctgcctcccgtaggagt

SEQ ID NO: 2049 - DNA, 8 bp, Artificial sequence
  Synthetic
taccgctt

SEQ ID NO: 2050 - DNA, 48 bp, Artificial sequence
  Synthetic
gcctccctcgcgccatcagtaccgcttcatgctgcctcccgtaggagt

SEQ ID NO: 2051 - DNA, 8 bp, Artificial sequence
  Synthetic
taccggat

SEQ ID NO: 2052 - DNA, 48 bp, Artificial sequence
  Synthetic
gcctccctcgcgccatcagtaccggatcatgctgcctcccgtaggagt

SEQ ID NO: 2053 - DNA, 8 bp, Artificial sequence
  Synthetic
taccggta

SEQ ID NO: 2054 - DNA, 48 bp, Artificial sequence
  Synthetic
gcctccctcgcgccatcagtaccggtacatgctgcctcccgtaggagt

SEQ ID NO: 2055 - DNA, 8 bp, Artificial sequence
  Synthetic
tacctacc

SEQ ID NO: 2056 - DNA, 48 bp, Artificial sequence
  Synthetic
gcctccctcgcgccatcagtacctacccatgctgcctcccgtaggagt

SEQ ID NO: 2057 - DNA, 8 bp, Artificial sequence
  Synthetic
tacctagg

SEQ ID NO: 2058 - DNA, 48 bp, Artificial sequence
  Synthetic
gcctccctcgcgccatcagtacctaggcatgctgcctcccgtaggagt

SEQ ID NO: 2059 - DNA, 8 bp, Artificial sequence
  Synthetic
taccttcg

SEQ ID NO: 2060 - DNA, 48 bp, Artificial sequence
  Synthetic
gcctccctcgcgccatcagtaccttcgcatgctgcctcccgtaggagt

SEQ ID NO: 2061 - DNA, 8 bp, Artificial sequence
  Synthetic
taccttgc

SEQ ID NO: 2062 - DNA, 48 bp, Artificial sequence
  Synthetic
gcctccctcgcgccatcagtaccttgccatgctgcctcccgtaggagt

SEQ ID NO: 2063 - DNA, 8 bp, Artificial sequence
  Synthetic
tacgaacc

SEQ ID NO: 2064 - DNA, 48 bp, Artificial sequence
  Synthetic
gcctccctcgcgccatcagtacgaacccatgctgcctcccgtaggagt

SEQ ID NO: 2065 - DNA, 8 bp, Artificial sequence
  Synthetic
tacgaagg

SEQ ID NO: 2066 - DNA, 48 bp, Artificial sequence
  Synthetic
gcctccctcgcgccatcagtacgaaggcatgctgcctcccgtaggagt

SEQ ID NO: 2067 - DNA, 8 bp, Artificial sequence
  Synthetic
tacgatcg

SEQ ID NO: 2068 - DNA, 48 bp, Artificial sequence
  Synthetic
gcctccctcgcgccatcagtacgatcgcatgctgcctcccgtaggagt

SEQ ID NO: 2069 - DNA, 8 bp, Artificial sequence
  Synthetic
tacgatgc

SEQ ID NO: 2070 - DNA, 48 bp, Artificial sequence
  Synthetic
gcctccctcgcgccatcagtacgatgccatgctgcctcccgtaggagt

SEQ ID NO: 2071 - DNA, 8 bp, Artificial sequence
  Synthetic
tacgccaa

SEQ ID NO: 2072 - DNA, 48 bp, Artificial sequence
  Synthetic
gcctccctcgcgccatcagtacgccaacatgctgcctcccgtaggagt

SEQ ID NO: 2073 - DNA, 8 bp, Artificial sequence
  Synthetic
tacgcctt

SEQ ID NO: 2074 - DNA, 48 bp, Artificial sequence
  Synthetic
gcctccctcgcgccatcagtacgccttcatgctgcctcccgtaggagt

SEQ ID NO: 2075 - DNA, 8 bp, Artificial sequence
  Synthetic
tacgcgat

SEQ ID NO: 2076 - DNA, 48 bp, Artificial sequence
  Synthetic
gcctccctcgcgccatcagtacgcgatcatgctgcctcccgtaggagt

SEQ ID NO: 2077 - DNA, 8 bp, Artificial sequence
  Synthetic
tacgcgta

SEQ ID NO: 2078 - DNA, 48 bp, Artificial sequence
  Synthetic
gcctccctcgcgccatcagtacgcgtacatgctgcctcccgtaggagt

SEQ ID NO: 2079 - DNA, 8 bp, Artificial sequence
  Synthetic
tacggcat

SEQ ID NO: 2080 - DNA, 48 bp, Artificial sequence
  Synthetic
gcctccctcgcgccatcagtacggcatcatgctgcctcccgtaggagt

SEQ ID NO: 2081 - DNA, 8 bp, Artificial sequence
  Synthetic
tacggcta

SEQ ID NO: 2082 - DNA, 48 bp, Artificial sequence
  Synthetic
gcctccctcgcgccatcagtacggctacatgctgcctcccgtaggagt

SEQ ID NO: 2083 - DNA, 8 bp, Artificial sequence
  Synthetic
tacgtacg

SEQ ID NO: 2084 - DNA, 48 bp, Artificial sequence
  Synthetic
gcctccctcgcgccatcagtacgtacgcatgctgcctcccgtaggagt

SEQ ID NO: 2085 - DNA, 8 bp, Artificial sequence
  Synthetic
tacgtagc

SEQ ID NO: 2086 - DNA, 48 bp, Artificial sequence
  Synthetic
gcctccctcgcgccatcagtacgtagccatgctgcctcccgtaggagt

SEQ ID NO: 2087 - DNA, 8 bp, Artificial sequence
  Synthetic
tacgttcc

SEQ ID NO: 2088 - DNA, 48 bp, Artificial sequence
  Synthetic
gcctccctcgcgccatcagtacgttcccatgctgcctcccgtaggagt

SEQ ID NO: 2089 - DNA, 8 bp, Artificial sequence
  Synthetic
tacgttgg

SEQ ID NO: 2090 - DNA, 48 bp, Artificial sequence
  Synthetic
gcctccctcgcgccatcagtacgttggcatgctgcctcccgtaggagt

SEQ ID NO: 2091 - DNA, 8 bp, Artificial sequence
  Synthetic
tagcaacc

SEQ ID NO: 2092 - DNA, 48 bp, Artificial sequence
  Synthetic
gcctccctcgcgccatcagtagcaacccatgctgcctcccgtaggagt

SEQ ID NO: 2093 - DNA, 8 bp, Artificial sequence
  Synthetic
tagcaagg

SEQ ID NO: 2094 - DNA, 48 bp, Artificial sequence
  Synthetic
gcctccctcgcgccatcagtagcaaggcatgctgcctcccgtaggagt

SEQ ID NO: 2095 - DNA, 8 bp, Artificial sequence
  Synthetic
tagcatcg

SEQ ID NO: 2096 - DNA, 48 bp, Artificial sequence
  Synthetic
gcctccctcgcgccatcagtagcatcgcatgctgcctcccgtaggagt

SEQ ID NO: 2097 - DNA, 8 bp, Artificial sequence
  Synthetic
tagcatgc

SEQ ID NO: 2098 - DNA, 48 bp, Artificial sequence
  Synthetic
gcctccctcgcgccatcagtagcatgccatgctgcctcccgtaggagt

SEQ ID NO: 2099 - DNA, 8 bp, Artificial sequence
  Synthetic
tagccgat

SEQ ID NO: 2100 - DNA, 48 bp, Artificial sequence
  Synthetic
gcctccctcgcgccatcagtagccgatcatgctgcctcccgtaggagt

SEQ ID NO: 2101 - DNA, 8 bp, Artificial sequence
  Synthetic
tagccgta

SEQ ID NO: 2102 - DNA, 48 bp, Artificial sequence
  Synthetic
gcctccctcgcgccatcagtagccgtacatgctgcctcccgtaggagt

SEQ ID NO: 2103 - DNA, 8 bp, Artificial sequence
  Synthetic
tagcgcat

SEQ ID NO: 2104 - DNA, 48 bp, Artificial sequence
  Synthetic
gcctccctcgcgccatcagtagcgcatcatgctgcctcccgtaggagt

SEQ ID NO: 2105 - DNA, 8 bp, Artificial sequence
  Synthetic
tagcgcta

SEQ ID NO: 2106 - DNA, 48 bp, Artificial sequence
  Synthetic
gcctccctcgcgccatcagtagcgctacatgctgcctcccgtaggagt

SEQ ID NO: 2107 - DNA, 8 bp, Artificial sequence
  Synthetic
tagcggaa

SEQ ID NO: 2108 - DNA, 48 bp, Artificial sequence
  Synthetic
gcctccctcgcgccatcagtagcggaacatgctgcctcccgtaggagt

SEQ ID NO: 2109 - DNA, 8 bp, Artificial sequence
  Synthetic
tagcggtt

SEQ ID NO: 2110 - DNA, 48 bp, Artificial sequence
  Synthetic
gcctccctcgcgccatcagtagcggttcatgctgcctcccgtaggagt

SEQ ID NO: 2111 - DNA, 8 bp, Artificial sequence
  Synthetic
tagctacg

SEQ ID NO: 2112 - DNA, 48 bp, Artificial sequence
  Synthetic
gcctccctcgcgccatcagtagctacgcatgctgcctcccgtaggagt

SEQ ID NO: 2113 - DNA, 8 bp, Artificial sequence
  Synthetic
tagctagc

SEQ ID NO: 2114 - DNA, 48 bp, Artificial sequence
  Synthetic
gcctccctcgcgccatcagtagctagccatgctgcctcccgtaggagt

SEQ ID NO: 2115 - DNA, 8 bp, Artificial sequence
  Synthetic
tagcttcc

SEQ ID NO: 2116 - DNA, 48 bp, Artificial sequence
  Synthetic
gcctccctcgcgccatcagtagcttcccatgctgcctcccgtaggagt

SEQ ID NO: 2117 - DNA, 8 bp, Artificial sequence
  Synthetic
tagcttgg

SEQ ID NO: 2118 - DNA, 48 bp, Artificial sequence
  Synthetic
gcctccctcgcgccatcagtagcttggcatgctgcctcccgtaggagt

SEQ ID NO: 2119 - DNA, 8 bp, Artificial sequence
  Synthetic
taggaacg

SEQ ID NO: 2120 - DNA, 48 bp, Artificial sequence
  Synthetic
gcctccctcgcgccatcagtaggaacgcatgctgcctcccgtaggagt

SEQ ID NO: 2121 - DNA, 8 bp, Artificial sequence
  Synthetic
taggaagc

SEQ ID NO: 2122 - DNA, 48 bp, Artificial sequence
  Synthetic
gcctccctcgcgccatcagtaggaagccatgctgcctcccgtaggagt

SEQ ID NO: 2123 - DNA, 8 bp, Artificial sequence
  Synthetic
taggatcc

SEQ ID NO: 2124 - DNA, 48 bp, Artificial sequence; identical to SEQ ID NO: 2114
  Synthetic

SEQ ID NO: 2125 - DNA, 8 bp, Artificial sequence
  Synthetic
tagcttcc

SEQ ID NO: 2126 - DNA, 48 bp, Artificial sequence; identical to SEQ ID NO: 2116
  Synthetic

SEQ ID NO: 2127 - DNA, 8 bp, Artificial sequence
  Synthetic
tagcttgg

SEQ ID NO: 2128 - DNA, 48 bp, Artificial sequence; identical to SEQ ID NO: 2118
  Synthetic

SEQ ID NO: 2129 - DNA, 8 bp, Artificial sequence
  Synthetic
taggaacg

SEQ ID NO: 2130 - DNA, 48 bp, Artificial sequence; identical to SEQ ID NO: 2120
  Synthetic

SEQ ID NO: 2131 - DNA, 8 bp, Artificial sequence
  Synthetic
taggaagc

SEQ ID NO: 2132 - DNA, 48 bp, Artificial sequence; identical to SEQ ID NO: 2122
  Synthetic

SEQ ID NO: 2133 - DNA, 8 bp, Artificial sequence
  Synthetic
taggatcc

SEQ ID NO: 2134 - DNA, 48 bp, Artificial sequence
  Synthetic
gcctccctcgcgccatcagtaggatcccatgctgcctcccgtaggagt

SEQ ID NO: 2135 - DNA, 8 bp, Artificial sequence
  Synthetic
taggatgg

SEQ ID NO: 2136 - DNA, 48 bp, Artificial sequence
  Synthetic
gcctccctcgcgccatcagtaggatggcatgctgcctcccgtaggagt

SEQ ID NO: 2137 - DNA, 8 bp, Artificial sequence
  Synthetic
taggccat

SEQ ID NO: 2138 - DNA, 48 bp, Artificial sequence
  Synthetic
gcctccctcgcgccatcagtaggccatcatgctgcctcccgtaggagt

SEQ ID NO: 2139 - DNA, 8 bp, Artificial sequence
  Synthetic
taggccta

SEQ ID NO: 2140 - DNA, 48 bp, Artificial sequence
  Synthetic
gcctccctcgcgccatcagtaggcctacatgctgcctcccgtaggagt

SEQ ID NO: 2141 - DNA, 8 bp, Artificial sequence
  Synthetic
taggcgaa

SEQ ID NO: 2142 - DNA, 48 bp, Artificial sequence
  Synthetic
gcctccctcgcgccatcagtaggcgaacatgctgcctcccgtaggagt

SEQ ID NO: 2143 - DNA, 8 bp, Artificial sequence
  Synthetic
taggcgtt

SEQ ID NO: 2144 - DNA, 48 bp, Artificial sequence
  Synthetic
gcctccctcgcgccatcagtaggcgttcatgctgcctcccgtaggagt

SEQ ID NO: 2145 - DNA, 8 bp, Artificial sequence
  Synthetic
taggtacc

SEQ ID NO: 2146 - DNA, 48 bp, Artificial sequence
  Synthetic
gcctccctcgcgccatcagtaggtacccatgctgcctcccgtaggagt

SEQ ID NO: 2147 - DNA, 8 bp, Artificial sequence
  Synthetic
taggtagg

SEQ ID NO: 2148 - DNA, 48 bp, Artificial sequence
  Synthetic
gcctccctcgcgccatcagtaggtaggcatgctgcctcccgtaggagt

SEQ ID NO: 2149 - DNA, 8 bp, Artificial sequence
  Synthetic
taggttcg

SEQ ID NO: 2150 - DNA, 48 bp, Artificial sequence
  Synthetic
gcctccctcgcgccatcagtaggttcgcatgctgcctcccgtaggagt

SEQ ID NO: 2151 - DNA, 8 bp, Artificial sequence
  Synthetic
taggttgc

SEQ ID NO: 2152 - DNA, 48 bp, Artificial sequence
  Synthetic
gcctccctcgcgccatcagtaggttgccatgctgcctcccgtaggagt

SEQ ID NO: 2153 - DNA, 8 bp, Artificial sequence
  Synthetic
tataccgg

SEQ ID NO: 2154 - DNA, 48 bp, Artificial sequence
  Synthetic
gcctccctcgcgccatcagtataccggcatgctgcctcccgtaggagt

SEQ ID NO: 2155 - DNA, 8 bp, Artificial sequence
  Synthetic
tatacgcg

SEQ ID NO: 2156 - DNA, 48 bp, Artificial sequence
  Synthetic
gcctccctcgcgccatcagtatacgcgcatgctgcctcccgtaggagt

SEQ ID NO: 2157 - DNA, 8 bp, Artificial sequence
  Synthetic
tatacggc

SEQ ID NO: 2158 - DNA, 48 bp, Artificial sequence
  Synthetic
gcctccctcgcgccatcagtatacggccatgctgcctcccgtaggagt

SEQ ID NO: 2159 - DNA, 8 bp, Artificial sequence
  Synthetic
tatagccg

SEQ ID NO: 2160 - DNA, 48 bp, Artificial sequence
  Synthetic
gcctccctcgcgccatcagtatagccgcatgctgcctcccgtaggagt

SEQ ID NO: 2161 - DNA, 8 bp, Artificial sequence
  Synthetic
tatagcgc

SEQ ID NO: 2162 - DNA, 48 bp, Artificial sequence
  Synthetic
gcctccctcgcgccatcagtatagcgccatgctgcctcccgtaggagt

SEQ ID NO: 2163 - DNA, 8 bp, Artificial sequence
  Synthetic
tataggcc

SEQ ID NO: 2164 - DNA, 48 bp, Artificial sequence
  Synthetic
gcctccctcgcgccatcagtataggcccatgctgcctcccgtaggagt

SEQ ID NO: 2165 - DNA, 8 bp, Artificial sequence
  Synthetic
tattccgc

SEQ ID NO: 2166 - DNA, 48 bp, Artificial sequence
  Synthetic
gcctccctcgcgccatcagtattccgccatgctgcctcccgtaggagt

SEQ ID NO: 2167 - DNA, 8 bp, Artificial sequence
  Synthetic
tattcgcc

SEQ ID NO: 2168 - DNA, 48 bp, Artificial sequence
  Synthetic
gcctccctcgcgccatcagtattcgcccatgctgcctcccgtaggagt

SEQ ID NO: 2169 - DNA, 8 bp, Artificial sequence
  Synthetic
tattgcgg

SEQ ID NO: 2170 - DNA, 48 bp, Artificial sequence
  Synthetic
gcctccctcgcgccatcagtattgcggcatgctgcctcccgtaggagt

SEQ ID NO: 2171 - DNA, 8 bp, Artificial sequence
  Synthetic
tattggcg

SEQ ID NO: 2172 - DNA, 48 bp, Artificial sequence
  Synthetic
gcctccctcgcgccatcagtattggcgcatgctgcctcccgtaggagt

SEQ ID NO: 2173 - DNA, 8 bp, Artificial sequence
  Synthetic
tcacacag

SEQ ID NO: 2174 - DNA, 48 bp, Artificial sequence
  Synthetic
gcctccctcgcgccatcagtcacacagcatgctgcctcccgtaggagt

SEQ ID NO: 2175 - DNA, 8 bp, Artificial sequence
  Synthetic
tcacactc

SEQ ID NO: 2176 - DNA, 48 bp, Artificial sequence
  Synthetic
gcctccctcgcgccatcagtcacactccatgctgcctcccgtaggagt

SEQ ID NO: 2177 - DNA, 8 bp, Artificial sequence
  Synthetic
tcacagac

SEQ ID NO: 2178 - DNA, 48 bp, Artificial sequence
  Synthetic
gcctccctcgcgccatcagtcacagaccatgctgcctcccgtaggagt

SEQ ID NO: 2179 - DNA, 8 bp, Artificial sequence
  Synthetic
tcacagtg

SEQ ID NO: 2180 - DNA, 48 bp, Artificial sequence
  Synthetic
gcctccctcgcgccatcagtcacagtgcatgctgcctcccgtaggagt

SEQ ID NO: 2181 - DNA, 8 bp, Artificial sequence
  Synthetic
tcaccact

SEQ ID NO: 2182 - DNA, 48 bp, Artificial sequence
  Synthetic
gcctccctcgcgccatcagtcaccactcatgctgcctcccgtaggagt

SEQ ID NO: 2183 - DNA, 8 bp, Artificial sequence
  Synthetic
tcaccaga

SEQ ID NO: 2184 - DNA, 48 bp, Artificial sequence
  Synthetic
gcctccctcgcgccatcagtcaccagacatgctgcctcccgtaggagt

SEQ ID NO: 2185 - DNA, 8 bp, Artificial sequence
  Synthetic
tcacctca

SEQ ID NO: 2186 - DNA, 48 bp, Artificial sequence
  Synthetic
gcctccctcgcgccatcagtcacctcacatgctgcctcccgtaggagt

SEQ ID NO: 2187 - DNA, 8 bp, Artificial sequence
  Synthetic
tcacctgt

SEQ ID NO: 2188 - DNA, 48 bp, Artificial sequence
  Synthetic
gcctccctcgcgccatcagtcacctgtcatgctgcctcccgtaggagt

SEQ ID NO: 2189 - DNA, 8 bp, Artificial sequence
  Synthetic
tcacgaca

SEQ ID NO: 2190 - DNA, 48 bp, Artificial sequence
  Synthetic
gcctccctcgcgccatcagtcacgacacatgctgcctcccgtaggagt

SEQ ID NO: 2191 - DNA, 8 bp, Artificial sequence
  Synthetic
tcacgagt

SEQ ID NO: 2192 - DNA, 48 bp, Artificial sequence
  Synthetic
gcctccctcgcgccatcagtcacgagtcatgctgcctcccgtaggagt

SEQ ID NO: 2193 - DNA, 8 bp, Artificial sequence
  Synthetic
tcacgtct

SEQ ID NO: 2194 - DNA, 48 bp, Artificial sequence
  Synthetic
gcctccctcgcgccatcagtcacgtctcatgctgcctcccgtaggagt

SEQ ID NO: 2195 - DNA, 8 bp, Artificial sequence
  Synthetic
tcacgtga

SEQ ID NO: 2196 - DNA, 48 bp, Artificial sequence
  Synthetic
gcctccctcgcgccatcagtcacgtgacatgctgcctcccgtaggagt

SEQ ID NO: 2197 - DNA, 8 bp, Artificial sequence
  Synthetic
tcactcac

SEQ ID NO: 2198 - DNA, 48 bp, Artificial sequence
  Synthetic
gcctccctcgcgccatcagtcactcaccatgctgcctcccgtaggagt

SEQ ID NO: 2199 - DNA, 8 bp, Artificial sequence
  Synthetic
tcactctg

SEQ ID NO: 2200 - DNA, 48 bp, Artificial sequence
  Synthetic
gcctccctcgcgccatcagtcactctgcatgctgcctcccgtaggagt

SEQ ID NO: 2201 - DNA, 8 bp, Artificial sequence
  Synthetic
tcactgag

SEQ ID NO: 2202 - DNA, 48 bp, Artificial sequence
  Synthetic
gcctccctcgcgccatcagtcactgagcatgctgcctcccgtaggagt

SEQ ID NO: 2203 - DNA, 8 bp, Artificial sequence
  Synthetic
tcactgtc

SEQ ID NO: 2204 - DNA, 48 bp, Artificial sequence
  Synthetic
gcctccctcgcgccatcagtcactgtccatgctgcctcccgtaggagt

SEQ ID NO: 2205 - DNA, 8 bp, Artificial sequence
  Synthetic
tcagacac

SEQ ID NO: 2206 - DNA, 48 bp, Artificial sequence
  Synthetic
gcctccctcgcgccatcagtcagacaccatgctgcctcccgtaggagt

SEQ ID NO: 2207 - DNA, 8 bp, Artificial sequence
  Synthetic
tcagactg

SEQ ID NO: 2208 - DNA, 48 bp, Artificial sequence
  Synthetic
gcctccctcgcgccatcagtcagactgcatgctgcctcccgtaggagt

SEQ ID NO: 2209 - DNA, 8 bp, Artificial sequence
  Synthetic
tcagagag

SEQ ID NO: 2210 - DNA, 48 bp, Artificial sequence
  Synthetic
gcctccctcgcgccatcagtcagagagcatgctgcctcccgtaggagt

SEQ ID NO: 2211 - DNA, 8 bp, Artificial sequence
  Synthetic
tcagagtc

SEQ ID NO: 2212 - DNA, 48 bp, Artificial sequence
  Synthetic
gcctccctcgcgccatcagtcagagtccatgctgcctcccgtaggagt

SEQ ID NO: 2213 - DNA, 8 bp, Artificial sequence
  Synthetic
tcagcaca

SEQ ID NO: 2214 - DNA, 48 bp, Artificial sequence
  Synthetic
gcctccctcgcgccatcagtcagcacacatgctgcctcccgtaggagt

SEQ ID NO: 2215 - DNA, 8 bp, Artificial sequence
  Synthetic
tcagcagt

SEQ ID NO: 2216 - DNA, 48 bp, Artificial sequence
  Synthetic
gcctccctcgcgccatcagtcagcagtcatgctgcctcccgtaggagt

SEQ ID NO: 2217 - DNA, 8 bp, Artificial sequence
  Synthetic
tcagctct

SEQ ID NO: 2218 - DNA, 48 bp, Artificial sequence
  Synthetic
gcctccctcgcgccatcagtcagctctcatgctgcctcccgtaggagt

SEQ ID NO: 2219 - DNA, 8 bp, Artificial sequence
  Synthetic
tcagctga

SEQ ID NO: 2220 - DNA, 48 bp, Artificial sequence
  Synthetic
gcctccctcgcgccatcagtcagctgacatgctgcctcccgtaggagt

SEQ ID NO: 2221 - DNA, 8 bp, Artificial sequence
  Synthetic
tcaggact

SEQ ID NO: 2222 - DNA, 48 bp, Artificial sequence
  Synthetic
gcctccctcgcgccatcagtcaggactcatgctgcctcccgtaggagt

SEQ ID NO: 2223 - DNA, 8 bp, Artificial sequence
  Synthetic
tcaggaga

SEQ ID NO: 2224 - DNA, 48 bp, Artificial sequence
  Synthetic
gcctccctcgcgccatcagtcaggagacatgctgcctcccgtaggagt

SEQ ID NO: 2225 - DNA, 8 bp, Artificial sequence
  Synthetic
tcaggtca

SEQ ID NO: 2226 - DNA, 48 bp, Artificial sequence
  Synthetic
gcctccctcgcgccatcagtcaggtcacatgctgcctcccgtaggagt

SEQ ID NO: 2227 - DNA, 8 bp, Artificial sequence
  Synthetic
tcaggtgt

SEQ ID NO: 2228 - DNA, 48 bp, Artificial sequence
  Synthetic
gcctccctcgcgccatcagtcaggtgtcatgctgcctcccgtaggagt

SEQ ID NO: 2229 - DNA, 8 bp, Artificial sequence
  Synthetic
tcagtcag

SEQ ID NO: 2230 - DNA, 48 bp, Artificial sequence
  Synthetic
gcctccctcgcgccatcagtcagtcagcatgctgcctcccgtaggagt

SEQ ID NO: 2231 - DNA, 8 bp, Artificial sequence
  Synthetic
tcagtctc

SEQ ID NO: 2232 - DNA, 48 bp, Artificial sequence
  Synthetic
gcctccctcgcgccatcagtcagtctccatgctgcctcccgtaggagt

SEQ ID NO: 2233 - DNA, 8 bp, Artificial sequence
  Synthetic
tcagtgac

SEQ ID NO: 2234 - DNA, 48 bp, Artificial sequence
  Synthetic
gcctccctcgcgccatcagtcagtgaccatgctgcctcccgtaggagt

SEQ ID NO: 2235 - DNA, 8 bp, Artificial sequence
  Synthetic
tcagtgtg

SEQ ID NO: 2236 - DNA, 48 bp, Artificial sequence
  Synthetic
gcctccctcgcgccatcagtcagtgtgcatgctgcctcccgtaggagt

SEQ ID NO: 2237 - DNA, 8 bp, Artificial sequence
  Synthetic
tccaacct

SEQ ID NO: 2238 - DNA, 48 bp, Artificial sequence
  Synthetic
gcctccctcgcgccatcagtccaacctcatgctgcctcccgtaggagt

SEQ ID NO: 2239 - DNA, 8 bp, Artificial sequence
  Synthetic
tccaacga

SEQ ID NO: 2240 - DNA, 48 bp, Artificial sequence
  Synthetic
gcctccctcgcgccatcagtccaacgacatgctgcctcccgtaggagt

SEQ ID NO: 2241 - DNA, 8 bp, Artificial sequence
  Synthetic
tccaagca

SEQ ID NO: 2242 - DNA, 48 bp, Artificial sequence
  Synthetic
gcctccctcgcgccatcagtccaagcacatgctgcctcccgtaggagt

SEQ ID NO: 2243 - DNA, 8 bp, Artificial sequence
  Synthetic
tccaaggt

SEQ ID NO: 2244 - DNA, 48 bp, Artificial sequence
  Synthetic
gcctccctcgcgccatcagtccaaggtcatgctgcctcccgtaggagt

SEQ ID NO: 2245 - DNA, 8 bp, Artificial sequence
  Synthetic
tccacaag

SEQ ID NO: 2246 - DNA, 48 bp, Artificial sequence
  Synthetic
gcctccctcgcgccatcagtccacaagcatgctgcctcccgtaggagt

SEQ ID NO: 2247 - DNA, 8 bp, Artificial sequence
  Synthetic
tccacatc

SEQ ID NO: 2248 - DNA, 48 bp, Artificial sequence
  Synthetic
gcctccctcgcgccatcagtccacatccatgctgcctcccgtaggagt

SEQ ID NO: 2249 - DNA, 8 bp, Artificial sequence
  Synthetic
tccactac

SEQ ID NO: 2250 - DNA, 48 bp, Artificial sequence
  Synthetic
gcctccctcgcgccatcagtccactaccatgctgcctcccgtaggagt

SEQ ID NO: 2251 - DNA, 8 bp, Artificial sequence
  Synthetic
tccacttg

SEQ ID NO: 2252 - DNA, 48 bp, Artificial sequence
  Synthetic
gcctccctcgcgccatcagtccacttgcatgctgcctcccgtaggagt

SEQ ID NO: 2253 - DNA, 8 bp, Artificial sequence
  Synthetic
tccagaac

SEQ ID NO: 2254 - DNA, 48 bp, Artificial sequence
  Synthetic
gcctccctcgcgccatcagtccagaaccatgctgcctcccgtaggagt

SEQ ID NO: 2255 - DNA, 8 bp, Artificial sequence
  Synthetic
tccagatg

SEQ ID NO: 2256 - DNA, 48 bp, Artificial sequence
  Synthetic
gcctccctcgcgccatcagtccagatgcatgctgcctcccgtaggagt

SEQ ID NO: 2257 - DNA, 8 bp, Artificial sequence
  Synthetic
tccagtag

SEQ ID NO: 2258 - DNA, 48 bp, Artificial sequence
  Synthetic
gcctccctcgcgccatcagtccagtagcatgctgcctcccgtaggagt

SEQ ID NO: 2259 - DNA, 8 bp, Artificial sequence
  Synthetic
tccagttc

SEQ ID NO: 2260 - DNA, 48 bp, Artificial sequence
  Synthetic
gcctccctcgcgccatcagtccagttccatgctgcctcccgtaggagt

SEQ ID NO: 2261 - DNA, 8 bp, Artificial sequence
  Synthetic
tccatcca

SEQ ID NO: 2262 - DNA, 48 bp, Artificial sequence
  Synthetic
gcctccctcgcgccatcagtccatccacatgctgcctcccgtaggagt

SEQ ID NO: 2263 - DNA, 8 bp, Artificial sequence
  Synthetic
tccatcgt

SEQ ID NO: 2264 - DNA, 48 bp, Artificial sequence
  Synthetic
gcctccctcgcgccatcagtccatcgtcatgctgcctcccgtaggagt

SEQ ID NO: 2265 - DNA, 8 bp, Artificial sequence
  Synthetic
tccatgct

SEQ ID NO: 2266 - DNA, 48 bp, Artificial sequence
  Synthetic
gcctccctcgcgccatcagtccatgctcatgctgcctcccgtaggagt

SEQ ID NO: 2267 - DNA, 8 bp, Artificial sequence
  Synthetic
tccatgga

SEQ ID NO: 2268 - DNA, 48 bp, Artificial sequence
  Synthetic
gcctccctcgcgccatcagtccatggacatgctgcctcccgtaggagt

SEQ ID NO: 2269 - DNA, 8 bp, Artificial sequence
  Synthetic
tcctacca

SEQ ID NO: 2270 - DNA, 48 bp, Artificial sequence
  Synthetic
gcctccctcgcgccatcagtcctaccacatgctgcctcccgtaggagt

SEQ ID NO: 2271 - DNA, 8 bp, Artificial sequence
  Synthetic
tcctacgt

SEQ ID NO: 2272 - DNA, 48 bp, Artificial sequence
  Synthetic
gcctccctcgcgccatcagtcctacgtcatgctgcctcccgtaggagt

SEQ ID NO: 2273 - DNA, 8 bp, Artificial sequence
  Synthetic
tcctagct

SEQ ID NO: 2274 - DNA, 48 bp, Artificial sequence
  Synthetic
gcctccctcgcgccatcagtcctagctcatgctgcctcccgtaggagt

SEQ ID NO: 2275 - DNA, 8 bp, Artificial sequence
  Synthetic
tcctagga

SEQ ID NO: 2276 - DNA, 48 bp, Artificial sequence
  Synthetic
gcctccctcgcgccatcagtcctaggacatgctgcctcccgtaggagt

SEQ ID NO: 2277 - DNA, 8 bp, Artificial sequence
  Synthetic
gtctgtct

SEQ ID NO: 2278 - DNA, 48 bp, Artificial sequence; identical to SEQ ID NO: 1878
  Synthetic

SEQ ID NO: 2279 - DNA, 8 bp, Artificial sequence
  Synthetic
gtctgtga

SEQ ID NO: 2280 - DNA, 48 bp, Artificial sequence; identical to SEQ ID NO: 1880
  Synthetic

SEQ ID NO: 2281 - DNA, 8 bp, Artificial sequence
  Synthetic
gtcttcac

SEQ ID NO: 2282 - DNA, 48 bp, Artificial sequence; identical to SEQ ID NO: 1882
  Synthetic

SEQ ID NO: 2283 - DNA, 8 bp, Artificial sequence
  Synthetic
gtcttctg

SEQ ID NO: 2284 - DNA, 48 bp, Artificial sequence; identical to SEQ ID NO: 1884
  Synthetic

SEQ ID NO: 2285 - DNA, 8 bp, Artificial sequence
  Synthetic
gtcttgag

SEQ ID NO: 2286 - DNA, 48 bp, Artificial sequence; identical to SEQ ID NO: 1886
  Synthetic

SEQ ID NO: 2287 - DNA, 8 bp, Artificial sequence
  Synthetic
gtcttgtc

SEQ ID NO: 2288 - DNA, 48 bp, Artificial sequence; identical to SEQ ID NO: 1888
  Synthetic

SEQ ID NO: 2289 - DNA, 8 bp, Artificial sequence
  Synthetic
gtgaacag

SEQ ID NO: 2290 - DNA, 48 bp, Artificial sequence; identical to SEQ ID NO: 1890
  Synthetic

SEQ ID NO: 2291 - DNA, 8 bp, Artificial sequence
  Synthetic
gtgaactc

SEQ ID NO: 2292 - DNA, 48 bp, Artificial sequence; identical to SEQ ID NO: 1892
  Synthetic

SEQ ID NO: 2293 - DNA, 8 bp, Artificial sequence
  Synthetic
gtgaagac

SEQ ID NO: 2294 - DNA, 48 bp, Artificial sequence; identical to SEQ ID NO: 1894
  Synthetic

SEQ ID NO: 2295 - DNA, 8 bp, Artificial sequence
  Synthetic
gtgaagtg

SEQ ID NO: 2296 - DNA, 48 bp, Artificial sequence; identical to SEQ ID NO: 1896
  Synthetic

SEQ ID NO: 2297 - DNA, 8 bp, Artificial sequence
  Synthetic
gtgacact

SEQ ID NO: 2298 - DNA, 48 bp, Artificial sequence; identical to SEQ ID NO: 1898
  Synthetic

SEQ ID NO: 2299 - DNA, 8 bp, Artificial sequence
  Synthetic
gtgacaga

SEQ ID NO: 2300 - DNA, 48 bp, Artificial sequence; identical to SEQ ID NO: 1900
  Synthetic

SEQ ID NO: 2301 - DNA, 8 bp, Artificial sequence
  Synthetic
gtgactca

SEQ ID NO: 2302 - DNA, 48 bp, Artificial sequence; identical to SEQ ID NO: 1902
  Synthetic

SEQ ID NO: 2303 - DNA, 8 bp, Artificial sequence
  Synthetic
gtgactgt

SEQ ID NO: 2304 - DNA, 48 bp, Artificial sequence; identical to SEQ ID NO: 1904
  Synthetic

SEQ ID NO: 2305 - DNA, 8 bp, Artificial sequence
  Synthetic
gtgagaca

SEQ ID NO: 2306 - DNA, 48 bp, Artificial sequence; identical to SEQ ID NO: 1906
  Synthetic

SEQ ID NO: 2307 - DNA, 8 bp, Artificial sequence
  Synthetic
gtgagagt

SEQ ID NO: 2308 - DNA, 48 bp, Artificial sequence; identical to SEQ ID NO: 1908
  Synthetic

SEQ ID NO: 2309 - DNA, 8 bp, Artificial sequence
  Synthetic
gtgagtct

SEQ ID NO: 2310 - DNA, 48 bp, Artificial sequence; identical to SEQ ID NO: 1910
  Synthetic

SEQ ID NO: 2311 - DNA, 8 bp, Artificial sequence
  Synthetic
gtgagtga

SEQ ID NO: 2312 - DNA, 48 bp, Artificial sequence; identical to SEQ ID NO: 1912
  Synthetic

SEQ ID NO: 2313 - DNA, 8 bp, Artificial sequence
  Synthetic
gtgatcac

SEQ ID NO: 2314 - DNA, 48 bp, Artificial sequence; identical to SEQ ID NO: 1914
  Synthetic

SEQ ID NO: 2315 - DNA, 8 bp, Artificial sequence
  Synthetic
gtgatctg

SEQ ID NO: 2316 - DNA, 48 bp, Artificial sequence; identical to SEQ ID NO: 1916
  Synthetic

SEQ ID NO: 2317 - DNA, 8 bp, Artificial sequence
  Synthetic
gtgatgag

SEQ ID NO: 2318 - DNA, 48 bp, Artificial sequence; identical to SEQ ID NO: 1918
  Synthetic

SEQ ID NO: 2319 - DNA, 8 bp, Artificial sequence
  Synthetic
gtgatgtc

SEQ ID NO: 2320 - DNA, 48 bp, Artificial sequence; identical to SEQ ID NO: 1920
  Synthetic

SEQ ID NO: 2321 - DNA, 8 bp, Artificial sequence
  Synthetic
gtgtacac

SEQ ID NO: 2322 - DNA, 48 bp, Artificial sequence; identical to SEQ ID NO: 1922
  Synthetic

SEQ ID NO: 2323 - DNA, 8 bp, Artificial sequence
  Synthetic
gtgtactg

SEQ ID NO: 2324 - DNA, 48 bp, Artificial sequence; identical to SEQ ID NO: 1924
  Synthetic

SEQ ID NO: 2325 - DNA, 8 bp, Artificial sequence
  Synthetic
gtgtagag

SEQ ID NO: 2326 - DNA, 48 bp, Artificial sequence; identical to SEQ ID NO: 1926
  Synthetic

SEQ ID NO: 2327 - DNA, 8 bp, Artificial sequence
  Synthetic
gtgtagtc

SEQ ID NO: 2328 - DNA, 48 bp, Artificial sequence; identical to SEQ ID NO: 1928
  Synthetic

SEQ ID NO: 2329 - DNA, 8 bp, Artificial sequence
  Synthetic
gtgtcaca

SEQ ID NO: 2330 - DNA, 48 bp, Artificial sequence; identical to SEQ ID NO: 1930
  Synthetic

SEQ ID NO: 2331 - DNA, 8 bp, Artificial sequence
  Synthetic
gtgtcagt

SEQ ID NO: 2332 - DNA, 48 bp, Artificial sequence; identical to SEQ ID NO: 1932
  Synthetic

SEQ ID NO: 2333 - DNA, 8 bp, Artificial sequence
  Synthetic
gtgtctct

SEQ ID NO: 2334 - DNA, 48 bp, Artificial sequence; identical to SEQ ID NO: 1934
  Synthetic

SEQ ID NO: 2335 - DNA, 8 bp, Artificial sequence
  Synthetic
gtgtctga

SEQ ID NO: 2336 - DNA, 48 bp, Artificial sequence; identical to SEQ ID NO: 1936
  Synthetic

SEQ ID NO: 2337 - DNA, 8 bp, Artificial sequence
  Synthetic
gtgtgact

SEQ ID NO: 2338 - DNA, 48 bp, Artificial sequence; identical to SEQ ID NO: 1938
  Synthetic

SEQ ID NO: 2339 - DNA, 8 bp, Artificial sequence
  Synthetic
gtgtgaga

SEQ ID NO: 2340 - DNA, 48 bp, Artificial sequence; identical to SEQ ID NO: 1940
  Synthetic

SEQ ID NO: 2341 - DNA, 8 bp, Artificial sequence
  Synthetic
gtgtgtca

SEQ ID NO: 2342 - DNA, 48 bp, Artificial sequence; identical to SEQ ID NO: 1942
  Synthetic

SEQ ID NO: 2343 - DNA, 8 bp, Artificial sequence
  Synthetic
gtgtgtgt

SEQ ID NO: 2344 - DNA, 48 bp, Artificial sequence; identical to SEQ ID NO: 1944
  Synthetic

SEQ ID NO: 2345 - DNA, 8 bp, Artificial sequence
  Synthetic
gtgttcag

SEQ ID NO: 2346 - DNA, 48 bp, Artificial sequence; identical to SEQ ID NO: 1946
  Synthetic

SEQ ID NO: 2347 - DNA, 8 bp, Artificial sequence
  Synthetic
gtgttctc

SEQ ID NO: 2348 - DNA, 48 bp, Artificial sequence; identical to SEQ ID NO: 1948
  Synthetic

SEQ ID NO: 2349 - DNA, 8 bp, Artificial sequence
  Synthetic
gtgttgac

SEQ ID NO: 2350 - DNA, 48 bp, Artificial sequence; identical to SEQ ID NO: 1950
  Synthetic

SEQ ID NO: 2351 - DNA, 8 bp, Artificial sequence
  Synthetic
gtgttgtg

SEQ ID NO: 2352 - DNA, 48 bp, Artificial sequence; identical to SEQ ID NO: 1952
  Synthetic

SEQ ID NO: 2353 - DNA, 8 bp, Artificial sequence
  Synthetic
gttcacct

SEQ ID NO: 2354 - DNA, 48 bp, Artificial sequence; identical to SEQ ID NO: 1954
  Synthetic

SEQ ID NO: 2355 - DNA, 8 bp, Artificial sequence
  Synthetic
gttcacga

SEQ ID NO: 2356 - DNA, 48 bp, Artificial sequence; identical to SEQ ID NO: 1956
  Synthetic

SEQ ID NO: 2357 - DNA, 8 bp, Artificial sequence
  Synthetic
gttcagca

SEQ ID NO: 2358 - DNA, 48 bp, Artificial sequence; identical to SEQ ID NO: 1958
  Synthetic

SEQ ID NO: 2359 - DNA, 8 bp, Artificial sequence
  Synthetic
gttcaggt

SEQ ID NO: 2360 - DNA, 48 bp, Artificial sequence; identical to SEQ ID NO: 1960
  Synthetic

SEQ ID NO: 2361 - DNA, 8 bp, Artificial sequence
  Synthetic
gttccaag

SEQ ID NO: 2362 - DNA, 48 bp, Artificial sequence; identical to SEQ ID NO: 1962
  Synthetic

SEQ ID NO: 2363 - DNA, 8 bp, Artificial sequence
  Synthetic
gttccatc

SEQ ID NO: 2364 - DNA, 48 bp, Artificial sequence; identical to SEQ ID NO: 1964
  Synthetic

SEQ ID NO: 2365 - DNA, 8 bp, Artificial sequence
  Synthetic
gttcctac

SEQ ID NO: 2366 - DNA, 48 bp, Artificial sequence; identical to SEQ ID NO: 1966
  Synthetic

SEQ ID NO: 2367 - DNA, 8 bp, Artificial sequence
  Synthetic
gttccttg

SEQ ID NO: 2368 - DNA, 48 bp, Artificial sequence; identical to SEQ ID NO: 1968
  Synthetic

SEQ ID NO: 2369 - DNA, 8 bp, Artificial sequence
  Synthetic
gttcgaac

SEQ ID NO: 2370 - DNA, 48 bp, Artificial sequence; identical to SEQ ID NO: 1970
  Synthetic

SEQ ID NO: 2371 - DNA, 8 bp, Artificial sequence
  Synthetic
gttcgatg

SEQ ID NO: 2372 - DNA, 48 bp, Artificial sequence; identical to SEQ ID NO: 1972
  Synthetic

SEQ ID NO: 2373 - DNA, 8 bp, Artificial sequence
  Synthetic
gttcgtag

SEQ ID NO: 2374 - DNA, 48 bp, Artificial sequence; identical to SEQ ID NO: 1974
  Synthetic

SEQ ID NO: 2375 - DNA, 8 bp, Artificial sequence
  Synthetic
gttcgttc

SEQ ID NO: 2376 - DNA, 48 bp, Artificial sequence; identical to SEQ ID NO: 1976
  Synthetic

SEQ ID NO: 2377 - DNA, 8 bp, Artificial sequence
  Synthetic
gttctcca

SEQ ID NO: 2378 - DNA, 48 bp, Artificial sequence; identical to SEQ ID NO: 1978
  Synthetic

SEQ ID NO: 2379 - DNA, 8 bp, Artificial sequence
  Synthetic
gttctcgt

SEQ ID NO: 2380 - DNA, 48 bp, Artificial sequence; identical to SEQ ID NO: 1980
  Synthetic

SEQ ID NO: 2381 - DNA, 8 bp, Artificial sequence
  Synthetic
gttctgct

SEQ ID NO: 2382 - DNA, 48 bp, Artificial sequence; identical to SEQ ID NO: 1982
  Synthetic

SEQ ID NO: 2383 - DNA, 8 bp, Artificial sequence
  Synthetic
gttctgga

SEQ ID NO: 2384 - DNA, 48 bp, Artificial sequence; identical to SEQ ID NO: 1984
  Synthetic

SEQ ID NO: 2385 - DNA, 8 bp, Artificial sequence
  Synthetic
gttgacca

SEQ ID NO: 2386 - DNA, 48 bp, Artificial sequence; identical to SEQ ID NO: 1986
  Synthetic

SEQ ID NO: 2387 - DNA, 8 bp, Artificial sequence
  Synthetic
gttgacgt

SEQ ID NO: 2388 - DNA, 48 bp, Artificial sequence; identical to SEQ ID NO: 1988
  Synthetic

SEQ ID NO: 2389 - DNA, 8 bp, Artificial sequence
  Synthetic
gttgagct

SEQ ID NO: 2390 - DNA, 48 bp, Artificial sequence; identical to SEQ ID NO: 1990
  Synthetic

SEQ ID NO: 2391 - DNA, 8 bp, Artificial sequence
  Synthetic
gttgagga

SEQ ID NO: 2392 - DNA, 48 bp, Artificial sequence; identical to SEQ ID NO: 1992
  Synthetic

SEQ ID NO: 2393 - DNA, 8 bp, Artificial sequence
  Synthetic
gttgcaac

SEQ ID NO: 2394 - DNA, 48 bp, Artificial sequence; identical to SEQ ID NO: 1994
  Synthetic

SEQ ID NO: 2395 - DNA, 8 bp, Artificial sequence
  Synthetic
gttgcatg

SEQ ID NO: 2396 - DNA, 48 bp, Artificial sequence; identical to SEQ ID NO: 1996
  Synthetic

SEQ ID NO: 2397 - DNA, 8 bp, Artificial sequence
  Synthetic
gttgctag

SEQ ID NO: 2398 - DNA, 48 bp, Artificial sequence; identical to SEQ ID NO: 1998
  Synthetic

SEQ ID NO: 2399 - DNA, 8 bp, Artificial sequence
  Synthetic
gttgcttc

SEQ ID NO: 2400 - DNA, 48 bp, Artificial sequence; identical to SEQ ID NO: 2000
  Synthetic

SEQ ID NO: 2401 - DNA, 8 bp, Artificial sequence
  Synthetic
gttggaag

SEQ ID NO: 2402 - DNA, 48 bp, Artificial sequence; identical to SEQ ID NO: 2002
  Synthetic

SEQ ID NO: 2403 - DNA, 8 bp, Artificial sequence
  Synthetic
gttggatc

SEQ ID NO: 2404 - DNA, 48 bp, Artificial sequence; identical to SEQ ID NO: 2004
  Synthetic

SEQ ID NO: 2405 - DNA, 8 bp, Artificial sequence
  Synthetic
gttggtac

SEQ ID NO: 2406 - DNA, 48 bp, Artificial sequence; identical to SEQ ID NO: 2006
  Synthetic

SEQ ID NO: 2407 - DNA, 8 bp, Artificial sequence
  Synthetic
gttggttg

SEQ ID NO: 2408 - DNA, 48 bp, Artificial sequence; identical to SEQ ID NO: 2008
  Synthetic

SEQ ID NO: 2409 - DNA, 8 bp, Artificial sequence
  Synthetic
gttgtcct

SEQ ID NO: 2410 - DNA, 48 bp, Artificial sequence; identical to SEQ ID NO: 2010
  Synthetic

SEQ ID NO: 2411 - DNA, 8 bp, Artificial sequence
  Synthetic
gttgtcga

SEQ ID NO: 2412 - DNA, 48 bp, Artificial sequence; identical to SEQ ID NO: 2012
  Synthetic

SEQ ID NO: 2413 - DNA, 8 bp, Artificial sequence
  Synthetic
gttgtgca

SEQ ID NO: 2414 - DNA, 48 bp, Artificial sequence; identical to SEQ ID NO: 2014
  Synthetic

SEQ ID NO: 2415 - DNA, 8 bp, Artificial sequence
  Synthetic
gttgtggt

SEQ ID NO: 2416 - DNA, 48 bp, Artificial sequence; identical to SEQ ID NO: 2016
  Synthetic

SEQ ID NO: 2417 - DNA, 8 bp, Artificial sequence
  Synthetic
taatccgg

SEQ ID NO: 2418 - DNA, 48 bp, Artificial sequence; identical to SEQ ID NO: 2018
  Synthetic

SEQ ID NO: 2419 - DNA, 8 bp, Artificial sequence
  Synthetic
taatcgcg

SEQ ID NO: 2420 - DNA, 48 bp, Artificial sequence; identical to SEQ ID NO: 2020
  Synthetic

SEQ ID NO: 2421 - DNA, 8 bp, Artificial sequence
  Synthetic
taatcggc

SEQ ID NO: 2422 - DNA, 48 bp, Artificial sequence; identical to SEQ ID NO: 2022
  Synthetic

SEQ ID NO: 2423 - DNA, 8 bp, Artificial sequence
  Synthetic
taatgccg

SEQ ID NO: 2424 - DNA, 48 bp, Artificial sequence; identical to SEQ ID NO: 2024
  Synthetic

SEQ ID NO: 2425 - DNA, 8 bp, Artificial sequence
  Synthetic
taatgcgc

SEQ ID NO: 2426 - DNA, 48 bp, Artificial sequence; identical to SEQ ID NO: 2026
  Synthetic

SEQ ID NO: 2427 - DNA, 8 bp, Artificial sequence
  Synthetic
taatggcc

SEQ ID NO: 2428 - DNA, 48 bp, Artificial sequence; identical to SEQ ID NO: 2028
  Synthetic

SEQ ID NO: 2429 - DNA, 8 bp, Artificial sequence
  Synthetic
taccaacg

SEQ ID NO: 2430 - DNA, 48 bp, Artificial sequence; identical to SEQ ID NO: 2030
  Synthetic

SEQ ID NO: 2431 - DNA, 8 bp, Artificial sequence
  Synthetic
taccaagc

SEQ ID NO: 2432 - DNA, 48 bp, Artificial sequence; identical to SEQ ID NO: 2032
  Synthetic

SEQ ID NO: 2433 - DNA, 8 bp, Artificial sequence
  Synthetic
taccatcc

SEQ ID NO: 2434 - DNA, 48 bp, Artificial sequence; identical to SEQ ID NO: 2024
  Synthetic

SEQ ID NO: 2435 - DNA, 8 bp, Artificial sequence
  Synthetic
taatgcgc

SEQ ID NO: 2436 - DNA, 48 bp, Artificial sequence; identical to SEQ ID NO: 2026
  Synthetic

SEQ ID NO: 2437 - DNA, 8 bp, Artificial sequence
  Synthetic
taatggcc

SEQ ID NO: 2438 - DNA, 48 bp, Artificial sequence; identical to SEQ ID NO: 2028
  Synthetic

SEQ ID NO: 2439 - DNA, 8 bp, Artificial sequence
  Synthetic
taccaacg

SEQ ID NO: 2440 - DNA, 48 bp, Artificial sequence; identical to SEQ ID NO: 2030
  Synthetic

SEQ ID NO: 2441 - DNA, 8 bp, Artificial sequence
  Synthetic
taccaagc

SEQ ID NO: 2442 - DNA, 48 bp, Artificial sequence; identical to SEQ ID NO: 2032
  Synthetic

SEQ ID NO: 2443 - DNA, 8 bp, Artificial sequence
  Synthetic
taccatcc

SEQ ID NO: 2444 - DNA, 48 bp, Artificial sequence; identical to SEQ ID NO: 2044
  Synthetic

SEQ ID NO: 2445 - DNA, 8 bp, Artificial sequence
  Synthetic
taccatgg

SEQ ID NO: 2446 - DNA, 48 bp, Artificial sequence; identical to SEQ ID NO: 2046
  Synthetic

SEQ ID NO: 2447 - DNA, 8 bp, Artificial sequence
  Synthetic
taccgcaa

SEQ ID NO: 2448 - DNA, 48 bp, Artificial sequence; identical to SEQ ID NO: 2048
  Synthetic

SEQ ID NO: 2449 - DNA, 8 bp, Artificial sequence
  Synthetic
taccgctt

SEQ ID NO: 2450 - DNA, 48 bp, Artificial sequence; identical to SEQ ID NO: 2050
  Synthetic

SEQ ID NO: 2451 - DNA, 8 bp, Artificial sequence
  Synthetic
taccggat

SEQ ID NO: 2452 - DNA, 48 bp, Artificial sequence; identical to SEQ ID NO: 2052
  Synthetic

SEQ ID NO: 2453 - DNA, 8 bp, Artificial sequence
  Synthetic
taccggta

SEQ ID NO: 2454 - DNA, 48 bp, Artificial sequence; identical to SEQ ID NO: 2054
  Synthetic

SEQ ID NO: 2455 - DNA, 8 bp, Artificial sequence
  Synthetic
tacctacc

SEQ ID NO: 2456 - DNA, 48 bp, Artificial sequence; identical to SEQ ID NO: 2056
  Synthetic

SEQ ID NO: 2457 - DNA, 8 bp, Artificial sequence
  Synthetic
tacctagg

SEQ ID NO: 2458 - DNA, 48 bp, Artificial sequence; identical to SEQ ID NO: 2058
  Synthetic

SEQ ID NO: 2459 - DNA, 8 bp, Artificial sequence
  Synthetic
taccttcg

SEQ ID NO: 2460 - DNA, 48 bp, Artificial sequence; identical to SEQ ID NO: 2060
  Synthetic

SEQ ID NO: 2461 - DNA, 8 bp, Artificial sequence
  Synthetic
taccttgc

SEQ ID NO: 2462 - DNA, 48 bp, Artificial sequence; identical to SEQ ID NO: 2062
  Synthetic

SEQ ID NO: 2463 - DNA, 8 bp, Artificial sequence
  Synthetic
tacgaacc

SEQ ID NO: 2464 - DNA, 48 bp, Artificial sequence; identical to SEQ ID NO: 2064
  Synthetic

SEQ ID NO: 2465 - DNA, 8 bp, Artificial sequence
  Synthetic
tacgaagg

SEQ ID NO: 2466 - DNA, 48 bp, Artificial sequence; identical to SEQ ID NO: 2066
  Synthetic

SEQ ID NO: 2467 - DNA, 8 bp, Artificial sequence
  Synthetic
tacgatcg

SEQ ID NO: 2468 - DNA, 48 bp, Artificial sequence; identical to SEQ ID NO: 2068
  Synthetic

SEQ ID NO: 2469 - DNA, 8 bp, Artificial sequence
  Synthetic
tacgatgc

SEQ ID NO: 2470 - DNA, 48 bp, Artificial sequence; identical to SEQ ID NO: 2070
  Synthetic

SEQ ID NO: 2471 - DNA, 8 bp, Artificial sequence
  Synthetic
tacgccaa

SEQ ID NO: 2472 - DNA, 48 bp, Artificial sequence; identical to SEQ ID NO: 2072
  Synthetic

SEQ ID NO: 2473 - DNA, 8 bp, Artificial sequence
  Synthetic
tacgcctt

SEQ ID NO: 2474 - DNA, 48 bp, Artificial sequence; identical to SEQ ID NO: 2074
  Synthetic

SEQ ID NO: 2475 - DNA, 8 bp, Artificial sequence
  Synthetic
tacgcgat

SEQ ID NO: 2476 - DNA, 48 bp, Artificial sequence; identical to SEQ ID NO: 2076
  Synthetic

SEQ ID NO: 2477 - DNA, 8 bp, Artificial sequence
  Synthetic
tacgcgta

SEQ ID NO: 2478 - DNA, 48 bp, Artificial sequence; identical to SEQ ID NO: 2078
  Synthetic

SEQ ID NO: 2479 - DNA, 8 bp, Artificial sequence
  Synthetic
tacggcat

SEQ ID NO: 2480 - DNA, 48 bp, Artificial sequence; identical to SEQ ID NO: 2080
  Synthetic

SEQ ID NO: 2481 - DNA, 8 bp, Artificial sequence
  Synthetic
tacggcta

SEQ ID NO: 2482 - DNA, 48 bp, Artificial sequence; identical to SEQ ID NO: 2082
  Synthetic

SEQ ID NO: 2483 - DNA, 8 bp, Artificial sequence
  Synthetic
tacgtacg

SEQ ID NO: 2484 - DNA, 48 bp, Artificial sequence; identical to SEQ ID NO: 2084
  Synthetic

SEQ ID NO: 2485 - DNA, 8 bp, Artificial sequence
  Synthetic
tacgtagc

SEQ ID NO: 2486 - DNA, 48 bp, Artificial sequence; identical to SEQ ID NO: 2086
  Synthetic

SEQ ID NO: 2487 - DNA, 8 bp, Artificial sequence
  Synthetic
tacgttcc

SEQ ID NO: 2488 - DNA, 48 bp, Artificial sequence; identical to SEQ ID NO: 2088
  Synthetic

SEQ ID NO: 2489 - DNA, 8 bp, Artificial sequence
  Synthetic
tacgttgg

SEQ ID NO: 2490 - DNA, 48 bp, Artificial sequence; identical to SEQ ID NO: 2090
  Synthetic

SEQ ID NO: 2491 - DNA, 8 bp, Artificial sequence
  Synthetic
tagcaacc

SEQ ID NO: 2492 - DNA, 48 bp, Artificial sequence; identical to SEQ ID NO: 2092
  Synthetic

SEQ ID NO: 2493 - DNA, 8 bp, Artificial sequence
  Synthetic
tagcaagg

SEQ ID NO: 2494 - DNA, 48 bp, Artificial sequence; identical to SEQ ID NO: 2094
  Synthetic

SEQ ID NO: 2495 - DNA, 8 bp, Artificial sequence
  Synthetic
tagcatcg

SEQ ID NO: 2496 - DNA, 48 bp, Artificial sequence; identical to SEQ ID NO: 2096
  Synthetic

SEQ ID NO: 2497 - DNA, 8 bp, Artificial sequence
  Synthetic
tagcatgc

SEQ ID NO: 2498 - DNA, 48 bp, Artificial sequence; identical to SEQ ID NO: 2098
  Synthetic

SEQ ID NO: 2499 - DNA, 8 bp, Artificial sequence
  Synthetic
tagccgat

SEQ ID NO: 2500 - DNA, 48 bp, Artificial sequence; identical to SEQ ID NO: 2100
  Synthetic

SEQ ID NO: 2501 - DNA, 8 bp, Artificial sequence
  Synthetic
tagccgta

SEQ ID NO: 2502 - DNA, 48 bp, Artificial sequence; identical to SEQ ID NO: 2102
  Synthetic

SEQ ID NO: 2503 - DNA, 8 bp, Artificial sequence
  Synthetic
tagcgcat

SEQ ID NO: 2504 - DNA, 48 bp, Artificial sequence; identical to SEQ ID NO: 2104
  Synthetic

SEQ ID NO: 2505 - DNA, 8 bp, Artificial sequence
  Synthetic
tagcgcta

SEQ ID NO: 2506 - DNA, 48 bp, Artificial sequence; identical to SEQ ID NO: 2106
  Synthetic

SEQ ID NO: 2507 - DNA, 8 bp, Artificial sequence
  Synthetic
tagcggaa

SEQ ID NO: 2508 - DNA, 48 bp, Artificial sequence; identical to SEQ ID NO: 2108
  Synthetic

SEQ ID NO: 2509 - DNA, 8 bp, Artificial sequence
  Synthetic
tagcggtt

SEQ ID NO: 2510 - DNA, 48 bp, Artificial sequence; identical to SEQ ID NO: 2110
  Synthetic

SEQ ID NO: 2511 - DNA, 8 bp, Artificial sequence
  Synthetic
tagctacg

SEQ ID NO: 2512 - DNA, 48 bp, Artificial sequence; identical to SEQ ID NO: 2112
  Synthetic

SEQ ID NO: 2513 - DNA, 8 bp, Artificial sequence
  Synthetic
tagctagc

SEQ ID NO: 2514 - DNA, 48 bp, Artificial sequence; identical to SEQ ID NO: 2114
  Synthetic

SEQ ID NO: 2515 - DNA, 8 bp, Artificial sequence
  Synthetic
tagcttcc

SEQ ID NO: 2516 - DNA, 48 bp, Artificial sequence; identical to SEQ ID NO: 2116
  Synthetic

SEQ ID NO: 2517 - DNA, 8 bp, Artificial sequence
  Synthetic
tagcttgg

SEQ ID NO: 2518 - DNA, 48 bp, Artificial sequence; identical to SEQ ID NO: 2118
  Synthetic

SEQ ID NO: 2519 - DNA, 8 bp, Artificial sequence
  Synthetic
taggaacg

SEQ ID NO: 2520 - DNA, 48 bp, Artificial sequence; identical to SEQ ID NO: 2120
  Synthetic

SEQ ID NO: 2521 - DNA, 8 bp, Artificial sequence
  Synthetic
taggaagc

SEQ ID NO: 2522 - DNA, 48 bp, Artificial sequence; identical to SEQ ID NO: 2122
  Synthetic

SEQ ID NO: 2523 - DNA, 8 bp, Artificial sequence
  Synthetic
taggatcc

SEQ ID NO: 2524 - DNA, 48 bp, Artificial sequence; identical to SEQ ID NO: 2114
  Synthetic

SEQ ID NO: 2525 - DNA, 8 bp, Artificial sequence
  Synthetic
tagcttcc

SEQ ID NO: 2526 - DNA, 48 bp, Artificial sequence; identical to SEQ ID NO: 2116
  Synthetic

SEQ ID NO: 2527 - DNA, 8 bp, Artificial sequence
  Synthetic
tagcttgg

SEQ ID NO: 2528 - DNA, 48 bp, Artificial sequence; identical to SEQ ID NO: 2118
  Synthetic

SEQ ID NO: 2529 - DNA, 8 bp, Artificial sequence
  Synthetic
taggaacg

SEQ ID NO: 2530 - DNA, 48 bp, Artificial sequence; identical to SEQ ID NO: 2120
  Synthetic

SEQ ID NO: 2531 - DNA, 8 bp, Artificial sequence
  Synthetic
taggaagc

SEQ ID NO: 2532 - DNA, 48 bp, Artificial sequence; identical to SEQ ID NO: 2122
  Synthetic

SEQ ID NO: 2533 - DNA, 8 bp, Artificial sequence
  Synthetic
taggatcc

SEQ ID NO: 2534 - DNA, 48 bp, Artificial sequence; identical to SEQ ID NO: 2134
  Synthetic

SEQ ID NO: 2535 - DNA, 8 bp, Artificial sequence
  Synthetic
taggatgg

SEQ ID NO: 2536 - DNA, 48 bp, Artificial sequence; identical to SEQ ID NO: 2136
  Synthetic

SEQ ID NO: 2537 - DNA, 8 bp, Artificial sequence
  Synthetic
taggccat

SEQ ID NO: 2538 - DNA, 48 bp, Artificial sequence; identical to SEQ ID NO: 2138
  Synthetic

SEQ ID NO: 2539 - DNA, 8 bp, Artificial sequence
  Synthetic
taggccta

SEQ ID NO: 2540 - DNA, 48 bp, Artificial sequence; identical to SEQ ID NO: 2140
  Synthetic

SEQ ID NO: 2541 - DNA, 8 bp, Artificial sequence
  Synthetic
taggcgaa

SEQ ID NO: 2542 - DNA, 48 bp, Artificial sequence; identical to SEQ ID NO: 2142
  Synthetic

SEQ ID NO: 2543 - DNA, 8 bp, Artificial sequence
  Synthetic
taggcgtt

SEQ ID NO: 2544 - DNA, 48 bp, Artificial sequence; identical to SEQ ID NO: 2144
  Synthetic

SEQ ID NO: 2545 - DNA, 8 bp, Artificial sequence
  Synthetic
taggtacc

SEQ ID NO: 2546 - DNA, 48 bp, Artificial sequence; identical to SEQ ID NO: 2146
  Synthetic

SEQ ID NO: 2547 - DNA, 8 bp, Artificial sequence
  Synthetic
taggtagg

SEQ ID NO: 2548 - DNA, 48 bp, Artificial sequence; identical to SEQ ID NO: 2148
  Synthetic

SEQ ID NO: 2549 - DNA, 8 bp, Artificial sequence
  Synthetic
taggttcg

SEQ ID NO: 2550 - DNA, 48 bp, Artificial sequence; identical to SEQ ID NO: 2150
  Synthetic

SEQ ID NO: 2551 - DNA, 8 bp, Artificial sequence
  Synthetic
taggttgc

SEQ ID NO: 2552 - DNA, 48 bp, Artificial sequence; identical to SEQ ID NO: 2152
  Synthetic

SEQ ID NO: 2553 - DNA, 8 bp, Artificial sequence
  Synthetic
tataccgg

SEQ ID NO: 2554 - DNA, 48 bp, Artificial sequence; identical to SEQ ID NO: 2154
  Synthetic

SEQ ID NO: 2555 - DNA, 8 bp, Artificial sequence
  Synthetic
tatacgcg

SEQ ID NO: 2556 - DNA, 48 bp, Artificial sequence; identical to SEQ ID NO: 2156
  Synthetic

SEQ ID NO: 2557 - DNA, 8 bp, Artificial sequence
  Synthetic
tatacggc

SEQ ID NO: 2558 - DNA, 48 bp, Artificial sequence; identical to SEQ ID NO: 2158
  Synthetic

SEQ ID NO: 2559 - DNA, 8 bp, Artificial sequence
  Synthetic
tatagccg

SEQ ID NO: 2560 - DNA, 48 bp, Artificial sequence; identical to SEQ ID NO: 2160
  Synthetic

SEQ ID NO: 2561 - DNA, 8 bp, Artificial sequence
  Synthetic
tatagcgc

SEQ ID NO: 2562 - DNA, 48 bp, Artificial sequence; identical to SEQ ID NO: 2162
  Synthetic

SEQ ID NO: 2563 - DNA, 8 bp, Artificial sequence
  Synthetic
tataggcc

SEQ ID NO: 2564 - DNA, 48 bp, Artificial sequence; identical to SEQ ID NO: 2164
  Synthetic

SEQ ID NO: 2565 - DNA, 8 bp, Artificial sequence
  Synthetic
tattccgc

SEQ ID NO: 2566 - DNA, 48 bp, Artificial sequence; identical to SEQ ID NO: 2166
  Synthetic

SEQ ID NO: 2567 - DNA, 8 bp, Artificial sequence
  Synthetic
tattcgcc

SEQ ID NO: 2568 - DNA, 48 bp, Artificial sequence; identical to SEQ ID NO: 2168
  Synthetic

SEQ ID NO: 2569 - DNA, 8 bp, Artificial sequence
  Synthetic
tattgcgg

SEQ ID NO: 2570 - DNA, 48 bp, Artificial sequence; identical to SEQ ID NO: 2170
  Synthetic

SEQ ID NO: 2571 - DNA, 8 bp, Artificial sequence
  Synthetic
tattggcg

SEQ ID NO: 2572 - DNA, 48 bp, Artificial sequence; identical to SEQ ID NO: 2172
  Synthetic

SEQ ID NO: 2573 - DNA, 8 bp, Artificial sequence
  Synthetic
tcacacag

SEQ ID NO: 2574 - DNA, 48 bp, Artificial sequence; identical to SEQ ID NO: 2174
  Synthetic

SEQ ID NO: 2575 - DNA, 8 bp, Artificial sequence
  Synthetic
tcacactc

SEQ ID NO: 2576 - DNA, 48 bp, Artificial sequence; identical to SEQ ID NO: 2176
  Synthetic

SEQ ID NO: 2577 - DNA, 8 bp, Artificial sequence
  Synthetic
tcacagac

SEQ ID NO: 2578 - DNA, 48 bp, Artificial sequence; identical to SEQ ID NO: 2178
  Synthetic

SEQ ID NO: 2579 - DNA, 8 bp, Artificial sequence
  Synthetic
tcacagtg

SEQ ID NO: 2580 - DNA, 48 bp, Artificial sequence; identical to SEQ ID NO: 2180
  Synthetic

SEQ ID NO: 2581 - DNA, 8 bp, Artificial sequence
  Synthetic
tcaccact

SEQ ID NO: 2582 - DNA, 48 bp, Artificial sequence; identical to SEQ ID NO: 2182
  Synthetic

SEQ ID NO: 2583 - DNA, 8 bp, Artificial sequence
  Synthetic
tcaccaga

SEQ ID NO: 2584 - DNA, 48 bp, Artificial sequence; identical to SEQ ID NO: 2184
  Synthetic

SEQ ID NO: 2585 - DNA, 8 bp, Artificial sequence
  Synthetic
tcacctca

SEQ ID NO: 2586 - DNA, 48 bp, Artificial sequence; identical to SEQ ID NO: 2186
  Synthetic

SEQ ID NO: 2587 - DNA, 8 bp, Artificial sequence
  Synthetic
tcacctgt

SEQ ID NO: 2588 - DNA, 48 bp, Artificial sequence; identical to SEQ ID NO: 2188
  Synthetic

SEQ ID NO: 2589 - DNA, 8 bp, Artificial sequence
  Synthetic
tcacgaca

SEQ ID NO: 2590 - DNA, 48 bp, Artificial sequence; identical to SEQ ID NO: 2190
  Synthetic

SEQ ID NO: 2591 - DNA, 8 bp, Artificial sequence
  Synthetic
tcacgagt

SEQ ID NO: 2592 - DNA, 48 bp, Artificial sequence; identical to SEQ ID NO: 2192
  Synthetic

SEQ ID NO: 2593 - DNA, 8 bp, Artificial sequence
  Synthetic
tcacgtct

SEQ ID NO: 2594 - DNA, 48 bp, Artificial sequence; identical to SEQ ID NO: 2194
  Synthetic

SEQ ID NO: 2595 - DNA, 8 bp, Artificial sequence
  Synthetic
tcacgtga

SEQ ID NO: 2596 - DNA, 48 bp, Artificial sequence; identical to SEQ ID NO: 2196
  Synthetic

SEQ ID NO: 2597 - DNA, 8 bp, Artificial sequence
  Synthetic
tcactcac

SEQ ID NO: 2598 - DNA, 48 bp, Artificial sequence; identical to SEQ ID NO: 2198
  Synthetic

SEQ ID NO: 2599 - DNA, 8 bp, Artificial sequence
  Synthetic
tcactctg

SEQ ID NO: 2600 - DNA, 48 bp, Artificial sequence; identical to SEQ ID NO: 2200
  Synthetic

SEQ ID NO: 2601 - DNA, 8 bp, Artificial sequence
  Synthetic
tcactgag

SEQ ID NO: 2602 - DNA, 48 bp, Artificial sequence; identical to SEQ ID NO: 2202
  Synthetic

SEQ ID NO: 2603 - DNA, 8 bp, Artificial sequence
  Synthetic
tcactgtc

SEQ ID NO: 2604 - DNA, 48 bp, Artificial sequence; identical to SEQ ID NO: 2204
  Synthetic

SEQ ID NO: 2605 - DNA, 8 bp, Artificial sequence
  Synthetic
tcagacac

SEQ ID NO: 2606 - DNA, 48 bp, Artificial sequence; identical to SEQ ID NO: 2206
  Synthetic

SEQ ID NO: 2607 - DNA, 8 bp, Artificial sequence
  Synthetic
tcagactg

SEQ ID NO: 2608 - DNA, 48 bp, Artificial sequence; identical to SEQ ID NO: 2208
  Synthetic

SEQ ID NO: 2609 - DNA, 8 bp, Artificial sequence
  Synthetic
tcagagag

SEQ ID NO: 2610 - DNA, 48 bp, Artificial sequence; identical to SEQ ID NO: 2210
  Synthetic

SEQ ID NO: 2611 - DNA, 8 bp, Artificial sequence
  Synthetic
tcagagtc

SEQ ID NO: 2612 - DNA, 48 bp, Artificial sequence; identical to SEQ ID NO: 2212
  Synthetic

SEQ ID NO: 2613 - DNA, 8 bp, Artificial sequence
  Synthetic
tcagcaca

SEQ ID NO: 2614 - DNA, 48 bp, Artificial sequence; identical to SEQ ID NO: 2214
  Synthetic

SEQ ID NO: 2615 - DNA, 8 bp, Artificial sequence
  Synthetic
tcagcagt

SEQ ID NO: 2616 - DNA, 48 bp, Artificial sequence; identical to SEQ ID NO: 2216
  Synthetic

SEQ ID NO: 2617 - DNA, 8 bp, Artificial sequence
  Synthetic
tcagctct

SEQ ID NO: 2618 - DNA, 48 bp, Artificial sequence; identical to SEQ ID NO: 2218
  Synthetic

SEQ ID NO: 2619 - DNA, 8 bp, Artificial sequence
  Synthetic
tcagctga

SEQ ID NO: 2620 - DNA, 48 bp, Artificial sequence; identical to SEQ ID NO: 2220
  Synthetic

SEQ ID NO: 2621 - DNA, 8 bp, Artificial sequence
  Synthetic
tcaggact

SEQ ID NO: 2622 - DNA, 48 bp, Artificial sequence; identical to SEQ ID NO: 2222
  Synthetic

SEQ ID NO: 2623 - DNA, 8 bp, Artificial sequence
  Synthetic
tcaggaga

SEQ ID NO: 2624 - DNA, 48 bp, Artificial sequence; identical to SEQ ID NO: 2224
  Synthetic

SEQ ID NO: 2625 - DNA, 8 bp, Artificial sequence
  Synthetic
tcaggtca

SEQ ID NO: 2626 - DNA, 48 bp, Artificial sequence; identical to SEQ ID NO: 2226
  Synthetic

SEQ ID NO: 2627 - DNA, 8 bp, Artificial sequence
  Synthetic
tcaggtgt

SEQ ID NO: 2628 - DNA, 48 bp, Artificial sequence; identical to SEQ ID NO: 2228
  Synthetic

SEQ ID NO: 2629 - DNA, 8 bp, Artificial sequence
  Synthetic
tcagtcag

SEQ ID NO: 2630 - DNA, 48 bp, Artificial sequence; identical to SEQ ID NO: 2230
  Synthetic

SEQ ID NO: 2631 - DNA, 8 bp, Artificial sequence
  Synthetic
tcagtctc

SEQ ID NO: 2632 - DNA, 48 bp, Artificial sequence; identical to SEQ ID NO: 2232
  Synthetic

SEQ ID NO: 2633 - DNA, 8 bp, Artificial sequence
  Synthetic
tcagtgac

SEQ ID NO: 2634 - DNA, 48 bp, Artificial sequence; identical to SEQ ID NO: 2234
  Synthetic

SEQ ID NO: 2635 - DNA, 8 bp, Artificial sequence
  Synthetic
tcagtgtg

SEQ ID NO: 2636 - DNA, 48 bp, Artificial sequence; identical to SEQ ID NO: 2236
  Synthetic

SEQ ID NO: 2637 - DNA, 8 bp, Artificial sequence
  Synthetic
tccaacct

SEQ ID NO: 2638 - DNA, 48 bp, Artificial sequence; identical to SEQ ID NO: 2238
  Synthetic

SEQ ID NO: 2639 - DNA, 8 bp, Artificial sequence
  Synthetic
tccaacga

SEQ ID NO: 2640 - DNA, 48 bp, Artificial sequence; identical to SEQ ID NO: 2240
  Synthetic

SEQ ID NO: 2641 - DNA, 8 bp, Artificial sequence
  Synthetic
tccaagca

SEQ ID NO: 2642 - DNA, 48 bp, Artificial sequence; identical to SEQ ID NO: 2242
  Synthetic

SEQ ID NO: 2643 - DNA, 8 bp, Artificial sequence
  Synthetic
tccaaggt

SEQ ID NO: 2644 - DNA, 48 bp, Artificial sequence; identical to SEQ ID NO: 2244
  Synthetic

SEQ ID NO: 2645 - DNA, 8 bp, Artificial sequence
  Synthetic
tccacaag

SEQ ID NO: 2646 - DNA, 48 bp, Artificial sequence; identical to SEQ ID NO: 2246
  Synthetic

SEQ ID NO: 2647 - DNA, 8 bp, Artificial sequence
  Synthetic
tccacatc

SEQ ID NO: 2648 - DNA, 48 bp, Artificial sequence; identical to SEQ ID NO: 2248
  Synthetic

SEQ ID NO: 2649 - DNA, 8 bp, Artificial sequence
  Synthetic
tccactac

SEQ ID NO: 2650 - DNA, 48 bp, Artificial sequence; identical to SEQ ID NO: 2250
  Synthetic

SEQ ID NO: 2651 - DNA, 8 bp, Artificial sequence
  Synthetic
tccacttg

SEQ ID NO: 2652 - DNA, 48 bp, Artificial sequence; identical to SEQ ID NO: 2252
  Synthetic

SEQ ID NO: 2653 - DNA, 8 bp, Artificial sequence
  Synthetic
tccagaac

SEQ ID NO: 2654 - DNA, 48 bp, Artificial sequence; identical to SEQ ID NO: 2254
  Synthetic

SEQ ID NO: 2655 - DNA, 8 bp, Artificial sequence
  Synthetic
tccagatg

SEQ ID NO: 2656 - DNA, 48 bp, Artificial sequence; identical to SEQ ID NO: 2256
  Synthetic

SEQ ID NO: 2657 - DNA, 8 bp, Artificial sequence
  Synthetic
tccagtag

SEQ ID NO: 2658 - DNA, 48 bp, Artificial sequence; identical to SEQ ID NO: 2258
  Synthetic

SEQ ID NO: 2659 - DNA, 8 bp, Artificial sequence
  Synthetic
tccagttc

SEQ ID NO: 2660 - DNA, 48 bp, Artificial sequence; identical to SEQ ID NO: 2260
  Synthetic

SEQ ID NO: 2661 - DNA, 8 bp, Artificial sequence
  Synthetic
tccatcca

SEQ ID NO: 2662 - DNA, 48 bp, Artificial sequence; identical to SEQ ID NO: 2262
  Synthetic

SEQ ID NO: 2663 - DNA, 8 bp, Artificial sequence
  Synthetic
tccatcgt

SEQ ID NO: 2664 - DNA, 48 bp, Artificial sequence; identical to SEQ ID NO: 2264
  Synthetic

SEQ ID NO: 2665 - DNA, 8 bp, Artificial sequence
  Synthetic
tccatgct

SEQ ID NO: 2666 - DNA, 48 bp, Artificial sequence; identical to SEQ ID NO: 2266
  Synthetic

SEQ ID NO: 2667 - DNA, 8 bp, Artificial sequence
  Synthetic
tccatgga

SEQ ID NO: 2668 - DNA, 48 bp, Artificial sequence; identical to SEQ ID NO: 2268
  Synthetic

SEQ ID NO: 2669 - DNA, 8 bp, Artificial sequence
  Synthetic
tcctacca

SEQ ID NO: 2670 - DNA, 48 bp, Artificial sequence; identical to SEQ ID NO: 2270
  Synthetic

SEQ ID NO: 2671 - DNA, 8 bp, Artificial sequence
  Synthetic
tcctacgt

SEQ ID NO: 2672 - DNA, 48 bp, Artificial sequence; identical to SEQ ID NO: 2272
  Synthetic

SEQ ID NO: 2673 - DNA, 8 bp, Artificial sequence
  Synthetic
tcctagct

SEQ ID NO: 2674 - DNA, 48 bp, Artificial sequence; identical to SEQ ID NO: 2274
  Synthetic

SEQ ID NO: 2675 - DNA, 8 bp, Artificial sequence
  Synthetic
tcctagga

SEQ ID NO: 2676 - DNA, 48 bp, Artificial sequence; identical to SEQ ID NO: 2276
  Synthetic

SEQ ID NO: 2677 - DNA, 8 bp, Artificial sequence
  Synthetic
tcctcaac

SEQ ID NO: 2678 - DNA, 48 bp, Artificial sequence
  Synthetic
gcctccctcgcgccatcagtcctcaaccatgctgcctcccgtaggagt

SEQ ID NO: 2679 - DNA, 8 bp, Artificial sequence
  Synthetic
tcctcatg

SEQ ID NO: 2680 - DNA, 48 bp, Artificial sequence
  Synthetic
gcctccctcgcgccatcagtcctcatgcatgctgcctcccgtaggagt

SEQ ID NO: 2681 - DNA, 8 bp, Artificial sequence
  Synthetic
tcctctag

SEQ ID NO: 2682 - DNA, 48 bp, Artificial sequence
  Synthetic
gcctccctcgcgccatcagtcctctagcatgctgcctcccgtaggagt

SEQ ID NO: 2683 - DNA, 8 bp, Artificial sequence
  Synthetic
tcctcttc

SEQ ID NO: 2684 - DNA, 48 bp, Artificial sequence
  Synthetic
gcctccctcgcgccatcagtcctcttccatgctgcctcccgtaggagt

SEQ ID NO: 2685 - DNA, 8 bp, Artificial sequence
  Synthetic
tcctgaag

SEQ ID NO: 2686 - DNA, 48 bp, Artificial sequence
  Synthetic
gcctccctcgcgccatcagtcctgaagcatgctgcctcccgtaggagt

SEQ ID NO: 2687 - DNA, 8 bp, Artificial sequence
  Synthetic
tcctgatc

SEQ ID NO: 2688 - DNA, 48 bp, Artificial sequence
  Synthetic
gcctccctcgcgccatcagtcctgatccatgctgcctcccgtaggagt

SEQ ID NO: 2689 - DNA, 8 bp, Artificial sequence
  Synthetic
tcctgtac

SEQ ID NO: 2690 - DNA, 48 bp, Artificial sequence
  Synthetic
gcctccctcgcgccatcagtcctgtaccatgctgcctcccgtaggagt

SEQ ID NO: 2691 - DNA, 8 bp, Artificial sequence
  Synthetic
tcctgttg

SEQ ID NO: 2692 - DNA, 48 bp, Artificial sequence
  Synthetic
gcctccctcgcgccatcagtcctgttgcatgctgcctcccgtaggagt

SEQ ID NO: 2693 - DNA, 8 bp, Artificial sequence
  Synthetic
tccttcct

SEQ ID NO: 2694 - DNA, 48 bp, Artificial sequence
  Synthetic
gcctccctcgcgccatcagtccttcctcatgctgcctcccgtaggagt

SEQ ID NO: 2695 - DNA, 8 bp, Artificial sequence
  Synthetic
tccttcga

SEQ ID NO: 2696 - DNA, 48 bp, Artificial sequence
  Synthetic
gcctccctcgcgccatcagtccttcgacatgctgcctcccgtaggagt

SEQ ID NO: 2697 - DNA, 8 bp, Artificial sequence
  Synthetic
tccttgca

SEQ ID NO: 2698 - DNA, 48 bp, Artificial sequence
  Synthetic
gcctccctcgcgccatcagtccttgcacatgctgcctcccgtaggagt

SEQ ID NO: 2699 - DNA, 8 bp, Artificial sequence
  Synthetic
tccttggt

SEQ ID NO: 2700 - DNA, 48 bp, Artificial sequence
  Synthetic
gcctccctcgcgccatcagtccttggtcatgctgcctcccgtaggagt

SEQ ID NO: 2701 - DNA, 8 bp, Artificial sequence
  Synthetic
tcgaacca

SEQ ID NO: 2702 - DNA, 48 bp, Artificial sequence
  Synthetic
gcctccctcgcgccatcagtcgaaccacatgctgcctcccgtaggagt

SEQ ID NO: 2703 - DNA, 8 bp, Artificial sequence
  Synthetic
tcgaacgt

SEQ ID NO: 2704 - DNA, 48 bp, Artificial sequence
  Synthetic
gcctccctcgcgccatcagtcgaacgtcatgctgcctcccgtaggagt

SEQ ID NO: 2705 - DNA, 8 bp, Artificial sequence
  Synthetic
tcgaagct

SEQ ID NO: 2706 - DNA, 48 bp, Artificial sequence
  Synthetic
gcctccctcgcgccatcagtcgaagctcatgctgcctcccgtaggagt

SEQ ID NO: 2707 - DNA, 8 bp, Artificial sequence
  Synthetic
tcgaagga

SEQ ID NO: 2708 - DNA, 48 bp, Artificial sequence
  Synthetic
gcctccctcgcgccatcagtcgaaggacatgctgcctcccgtaggagt

SEQ ID NO: 2709 - DNA, 8 bp, Artificial sequence
  Synthetic
tcgacaac

SEQ ID NO: 2710 - DNA, 48 bp, Artificial sequence
  Synthetic
gcctccctcgcgccatcagtcgacaaccatgctgcctcccgtaggagt

SEQ ID NO: 2711 - DNA, 8 bp, Artificial sequence
  Synthetic
tcgacatg

SEQ ID NO: 2712 - DNA, 48 bp, Artificial sequence
  Synthetic
gcctccctcgcgccatcagtcgacatgcatgctgcctcccgtaggagt

SEQ ID NO: 2713 - DNA, 8 bp, Artificial sequence
  Synthetic
tcgactag

SEQ ID NO: 2714 - DNA, 48 bp, Artificial sequence
  Synthetic
gcctccctcgcgccatcagtcgactagcatgctgcctcccgtaggagt

SEQ ID NO: 2715 - DNA, 8 bp, Artificial sequence
  Synthetic
tcgacttc

SEQ ID NO: 2716 - DNA, 48 bp, Artificial sequence
  Synthetic
gcctccctcgcgccatcagtcgacttccatgctgcctcccgtaggagt

SEQ ID NO: 2717 - DNA, 8 bp, Artificial sequence
  Synthetic
tcgagaag

SEQ ID NO: 2718 - DNA, 48 bp, Artificial sequence
  Synthetic
gcctccctcgcgccatcagtcgagaagcatgctgcctcccgtaggagt

SEQ ID NO: 2719 - DNA, 8 bp, Artificial sequence
  Synthetic
tcgagatc

SEQ ID NO: 2720 - DNA, 48 bp, Artificial sequence
  Synthetic
gcctccctcgcgccatcagtcgagatccatgctgcctcccgtaggagt

SEQ ID NO: 2721 - DNA, 8 bp, Artificial sequence
  Synthetic
tcgagtac

SEQ ID NO: 2722 - DNA, 48 bp, Artificial sequence
  Synthetic
gcctccctcgcgccatcagtcgagtaccatgctgcctcccgtaggagt

SEQ ID NO: 2723 - DNA, 8 bp, Artificial sequence
  Synthetic
tcgagttg

SEQ ID NO: 2724 - DNA, 48 bp, Artificial sequence
  Synthetic
gcctccctcgcgccatcagtcgagttgcatgctgcctcccgtaggagt

SEQ ID NO: 2725 - DNA, 8 bp, Artificial sequence
  Synthetic
tcgatcct

SEQ ID NO: 2726 - DNA, 48 bp, Artificial sequence
  Synthetic
gcctccctcgcgccatcagtcgatcctcatgctgcctcccgtaggagt

SEQ ID NO: 2727 - DNA, 8 bp, Artificial sequence
  Synthetic
tcgatcga

SEQ ID NO: 2728 - DNA, 48 bp, Artificial sequence
  Synthetic
gcctccctcgcgccatcagtcgatcgacatgctgcctcccgtaggagt

SEQ ID NO: 2729 - DNA, 8 bp, Artificial sequence
  Synthetic
tcgatgca

SEQ ID NO: 2730 - DNA, 48 bp, Artificial sequence
  Synthetic
gcctccctcgcgccatcagtcgatgcacatgctgcctcccgtaggagt

SEQ ID NO: 2731 - DNA, 8 bp, Artificial sequence
  Synthetic
tcgatggt

SEQ ID NO: 2732 - DNA, 48 bp, Artificial sequence
  Synthetic
gcctccctcgcgccatcagtcgatggtcatgctgcctcccgtaggagt

SEQ ID NO: 2733 - DNA, 8 bp, Artificial sequence
  Synthetic
tcgtacct

SEQ ID NO: 2734 - DNA, 48 bp, Artificial sequence
  Synthetic
gcctccctcgcgccatcagtcgtacctcatgctgcctcccgtaggagt

SEQ ID NO: 2735 - DNA, 8 bp, Artificial sequence
  Synthetic
tcgtacga

SEQ ID NO: 2736 - DNA, 49 bp, Artificial sequence
  Synthetic
gcctccctcgcgccatcagtcgtacgacatgctgcctcccgtaggagts

SEQ ID NO: 2737 - DNA, 8 bp, Artificial sequence
  Synthetic
tcgtagca

SEQ ID NO: 2738 - DNA, 48 bp, Artificial sequence
  Synthetic
gcctccctcgcgccatcagtcgtagcacatgctgcctcccgtaggagt

SEQ ID NO: 2739 - DNA, 8 bp, Artificial sequence
  Synthetic
tcgtaggt

SEQ ID NO: 2740 - DNA, 48 bp, Artificial sequence
  Synthetic
gcctccctcgcgccatcagtcgtaggtcatgctgcctcccgtaggagt

SEQ ID NO: 2741 - DNA, 8 bp, Artificial sequence
  Synthetic
tcgtcaag

SEQ ID NO: 2742 - DNA, 48 bp, Artificial sequence
  Synthetic
gcctccctcgcgccatcagtcgtcaagcatgctgcctcccgtaggagt

SEQ ID NO: 2743 - DNA, 8 bp, Artificial sequence
  Synthetic
tcgtcatc

SEQ ID NO: 2744 - DNA, 48 bp, Artificial sequence
  Synthetic
gcctccctcgcgccatcagtcgtcatccatgctgcctcccgtaggagt

SEQ ID NO: 2745 - DNA, 8 bp, Artificial sequence
  Synthetic
tcgtctac

SEQ ID NO: 2746 - DNA, 48 bp, Artificial sequence
  Synthetic
gcctccctcgcgccatcagtcgtctaccatgctgcctcccgtaggagt

SEQ ID NO: 2747 - DNA, 8 bp, Artificial sequence
  Synthetic
tcgtcttg

SEQ ID NO: 2748 - DNA, 48 bp, Artificial sequence
  Synthetic
gcctccctcgcgccatcagtcgtcttgcatgctgcctcccgtaggagt

SEQ ID NO: 2749 - DNA, 8 bp, Artificial sequence
  Synthetic
tcgtgaac

SEQ ID NO: 2750 - DNA, 48 bp, Artificial sequence
  Synthetic
gcctccctcgcgccatcagtcgtgaaccatgctgcctcccgtaggagt

SEQ ID NO: 2751 - DNA, 8 bp, Artificial sequence
  Synthetic
tcgtgatg

SEQ ID NO: 2752 - DNA, 48 bp, Artificial sequence
  Synthetic
gcctccctcgcgccatcagtcgtgatgcatgctgcctcccgtaggagt

SEQ ID NO: 2753 - DNA, 8 bp, Artificial sequence
  Synthetic
tcgtgtag

SEQ ID NO: 2754 - DNA, 48 bp, Artificial sequence
  Synthetic
gcctccctcgcgccatcagtcgtgtagcatgctgcctcccgtaggagt

SEQ ID NO: 2755 - DNA, 8 bp, Artificial sequence
  Synthetic
tcgtgttc

SEQ ID NO: 2756 - DNA, 48 bp, Artificial sequence
  Synthetic
gcctccctcgcgccatcagtcgtgttccatgctgcctcccgtaggagt

SEQ ID NO: 2757 - DNA, 8 bp, Artificial sequence
  Synthetic
tcgttcca

SEQ ID NO: 2758 - DNA, 48 bp, Artificial sequence
  Synthetic
gcctccctcgcgccatcagtcgttccacatgctgcctcccgtaggagt

SEQ ID NO: 2759 - DNA, 8 bp, Artificial sequence
  Synthetic
tcgttcgt

SEQ ID NO: 2760 - DNA, 48 bp, Artificial sequence
  Synthetic
gcctccctcgcgccatcagtcgttcgtcatgctgcctcccgtaggagt

SEQ ID NO: 2761 - DNA, 8 bp, Artificial sequence
  Synthetic
tcgttgct

SEQ ID NO: 2762 - DNA, 48 bp, Artificial sequence
  Synthetic
gcctccctcgcgccatcagtcgttgctcatgctgcctcccgtaggagt

SEQ ID NO: 2763 - DNA, 8 bp, Artificial sequence
  Synthetic
tcgttgga

SEQ ID NO: 2764 - DNA, 48 bp, Artificial sequence
  Synthetic
gcctccctcgcgccatcagtcgttggacatgctgcctcccgtaggagt

SEQ ID NO: 2765 - DNA, 8 bp, Artificial sequence
  Synthetic
tctcacac

SEQ ID NO: 2766 - DNA, 48 bp, Artificial sequence
  Synthetic
gcctccctcgcgccatcagtctcacaccatgctgcctcccgtaggagt

SEQ ID NO: 2767 - DNA, 8 bp, Artificial sequence
  Synthetic
tctcactg

SEQ ID NO: 2768 - DNA, 48 bp, Artificial sequence
  Synthetic
gcctccctcgcgccatcagtctcactgcatgctgcctcccgtaggagt

SEQ ID NO: 2769 - DNA, 8 bp, Artificial sequence
  Synthetic
tctcagag

SEQ ID NO: 2770 - DNA, 48 bp, Artificial sequence
  Synthetic
gcctccctcgcgccatcagtctcagagcatgctgcctcccgtaggagt

SEQ ID NO: 2771 - DNA, 8 bp, Artificial sequence
  Synthetic
tctcagtc

SEQ ID NO: 2772 - DNA, 48 bp, Artificial sequence
  Synthetic
gcctccctcgcgccatcagtctcagtccatgctgcctcccgtaggagt

SEQ ID NO: 2773 - DNA, 8 bp, Artificial sequence
  Synthetic
tctccaca

SEQ ID NO: 2774 - DNA, 48 bp, Artificial sequence
  Synthetic
gcctccctcgcgccatcagtctccacacatgctgcctcccgtaggagt

SEQ ID NO: 2775 - DNA, 8 bp, Artificial sequence
  Synthetic
tctccagt

SEQ ID NO: 2776 - DNA, 48 bp, Artificial sequence
  Synthetic
gcctccctcgcgccatcagtctccagtcatgctgcctcccgtaggagt

SEQ ID NO: 2777 - DNA, 8 bp, Artificial sequence
  Synthetic
tctcctct

SEQ ID NO: 2778 - DNA, 48 bp, Artificial sequence
  Synthetic
gcctccctcgcgccatcagtctcctctcatgctgcctcccgtaggagt

SEQ ID NO: 2779 - DNA, 8 bp, Artificial sequence
  Synthetic
tctcctga

SEQ ID NO: 2780 - DNA, 48 bp, Artificial sequence
  Synthetic
gcctccctcgcgccatcagtctcctgacatgctgcctcccgtaggagt

SEQ ID NO: 2781 - DNA, 8 bp, Artificial sequence
  Synthetic
tctcgact

SEQ ID NO: 2782 - DNA, 48 bp, Artificial sequence
  Synthetic
gcctccctcgcgccatcagtctcgactcatgctgcctcccgtaggagt

SEQ ID NO: 2783 - DNA, 8 bp, Artificial sequence
  Synthetic
tctcgaga

SEQ ID NO: 2784 - DNA, 48 bp, Artificial sequence
  Synthetic
gcctccctcgcgccatcagtctcgagacatgctgcctcccgtaggagt

SEQ ID NO: 2785 - DNA, 8 bp, Artificial sequence
  Synthetic
tctcgtca

SEQ ID NO: 2786 - DNA, 48 bp, Artificial sequence
  Synthetic
gcctccctcgcgccatcagtctcgtcacatgctgcctcccgtaggagt

SEQ ID NO: 2787 - DNA, 8 bp, Artificial sequence
  Synthetic
tctcgtgt

SEQ ID NO: 2788 - DNA, 48 bp, Artificial sequence
  Synthetic
gcctccctcgcgccatcagtctcgtgtcatgctgcctcccgtaggagt

SEQ ID NO: 2789 - DNA, 8 bp, Artificial sequence
  Synthetic
tctctcag

SEQ ID NO: 2790 - DNA, 48 bp, Artificial sequence
  Synthetic
gcctccctcgcgccatcagtctctcagcatgctgcctcccgtaggagt

SEQ ID NO: 2791 - DNA, 8 bp, Artificial sequence
  Synthetic
tctctctc

SEQ ID NO: 2792 - DNA, 48 bp, Artificial sequence
  Synthetic
gcctccctcgcgccatcagtctctctccatgctgcctcccgtaggagt

SEQ ID NO: 2793 - DNA, 8 bp, Artificial sequence
  Synthetic
tctctgac

SEQ ID NO: 2794 - DNA, 48 bp, Artificial sequence
  Synthetic
gcctccctcgcgccatcagtctctgaccatgctgcctcccgtaggagt

SEQ ID NO: 2795 - DNA, 8 bp, Artificial sequence
  Synthetic
tctctgtg

SEQ ID NO: 2796 - DNA, 48 bp, Artificial sequence
  Synthetic
gcctccctcgcgccatcagtctctgtgcatgctgcctcccgtaggagt

SEQ ID NO: 2797 - DNA, 8 bp, Artificial sequence
  Synthetic
tctgacag

SEQ ID NO: 2798 - DNA, 48 bp, Artificial sequence
  Synthetic
gcctccctcgcgccatcagtctgacagcatgctgcctcccgtaggagt

SEQ ID NO: 2799 - DNA, 8 bp, Artificial sequence
  Synthetic
tctgactc

SEQ ID NO: 2800 - DNA, 48 bp, Artificial sequence
  Synthetic
gcctccctcgcgccatcagtctgactccatgctgcctcccgtaggagt

SEQ ID NO: 2801 - DNA, 8 bp, Artificial sequence
  Synthetic
tctgagac

SEQ ID NO: 2802 - DNA, 48 bp, Artificial sequence
  Synthetic
gcctccctcgcgccatcagtctgagaccatgctgcctcccgtaggagt

SEQ ID NO: 2803 - DNA, 8 bp, Artificial sequence
  Synthetic
tctgagtg

SEQ ID NO: 2804 - DNA, 48 bp, Artificial sequence
  Synthetic
gcctccctcgcgccatcagtctgagtgcatgctgcctcccgtaggagt

SEQ ID NO: 2805 - DNA, 8 bp, Artificial sequence
  Synthetic
tctgcact

SEQ ID NO: 2806 - DNA, 48 bp, Artificial sequence
  Synthetic
gcctccctcgcgccatcagtctgcactcatgctgcctcccgtaggagt

SEQ ID NO: 2807 - DNA, 8 bp, Artificial sequence
  Synthetic
tctgcaga

SEQ ID NO: 2808 - DNA, 48 bp, Artificial sequence
  Synthetic
gcctccctcgcgccatcagtctgcagacatgctgcctcccgtaggagt

SEQ ID NO: 2809 - DNA, 8 bp, Artificial sequence
  Synthetic
tctgctca

SEQ ID NO: 2810 - DNA, 48 bp, Artificial sequence
  Synthetic
gcctccctcgcgccatcagtctgctcacatgctgcctcccgtaggagt

SEQ ID NO: 2811 - DNA, 8 bp, Artificial sequence
  Synthetic
tctgctgt

SEQ ID NO: 2812 - DNA, 48 bp, Artificial sequence
  Synthetic
gcctccctcgcgccatcagtctgctgtcatgctgcctcccgtaggagt

SEQ ID NO: 2813 - DNA, 8 bp, Artificial sequence
  Synthetic
tctggaca

SEQ ID NO: 2814 - DNA, 48 bp, Artificial sequence
  Synthetic
gcctccctcgcgccatcagtctggacacatgctgcctcccgtaggagt

SEQ ID NO: 2815 - DNA, 8 bp, Artificial sequence
  Synthetic
tctggagt

SEQ ID NO: 2816 - DNA, 48 bp, Artificial sequence
  Synthetic
gcctccctcgcgccatcagtctggagtcatgctgcctcccgtaggagt

SEQ ID NO: 2817 - DNA, 8 bp, Artificial sequence
  Synthetic
tctggtct

SEQ ID NO: 2818 - DNA, 48 bp, Artificial sequence
  Synthetic
gcctccctcgcgccatcagtctggtctcatgctgcctcccgtaggagt

SEQ ID NO: 2819 - DNA, 8 bp, Artificial sequence
  Synthetic
tctggtga

SEQ ID NO: 2820 - DNA, 48 bp, Artificial sequence
  Synthetic
gcctccctcgcgccatcagtctggtgacatgctgcctcccgtaggagt

SEQ ID NO: 2821 - DNA, 8 bp, Artificial sequence
  Synthetic
tctgtcac

SEQ ID NO: 2822 - DNA, 48 bp, Artificial sequence
  Synthetic
gcctccctcgcgccatcagtctgtcaccatgctgcctcccgtaggagt

SEQ ID NO: 2823 - DNA, 8 bp, Artificial sequence
  Synthetic
tctgtctg

SEQ ID NO: 2824 - DNA, 48 bp, Artificial sequence
  Synthetic
gcctccctcgcgccatcagtctgtctgcatgctgcctcccgtaggagt

SEQ ID NO: 2825 - DNA, 8 bp, Artificial sequence
  Synthetic
tctgtgag

SEQ ID NO: 2826 - DNA, 48 bp, Artificial sequence
  Synthetic
gcctccctcgcgccatcagtctgtgagcatgctgcctcccgtaggagt

SEQ ID NO: 2827 - DNA, 8 bp, Artificial sequence
  Synthetic
tctgtgtc

SEQ ID NO: 2828 - DNA, 48 bp, Artificial sequence
  Synthetic
gcctccctcgcgccatcagtctgtgtccatgctgcctcccgtaggagt

SEQ ID NO: 2829 - DNA, 8 bp, Artificial sequence
  Synthetic
tgacacac

SEQ ID NO: 2830 - DNA, 48 bp, Artificial sequence
  Synthetic
gcctccctcgcgccatcagtgacacaccatgctgcctcccgtaggagt

SEQ ID NO: 2831 - DNA, 8 bp, Artificial sequence
  Synthetic
tgacactg

SEQ ID NO: 2832 - DNA, 48 bp, Artificial sequence
  Synthetic
gcctccctcgcgccatcagtgacactgcatgctgcctcccgtaggagt

SEQ ID NO: 2833 - DNA, 8 bp, Artificial sequence
  Synthetic
tgacagag

SEQ ID NO: 2834 - DNA, 48 bp, Artificial sequence
  Synthetic
gcctccctcgcgccatcagtgacagagcatgctgcctcccgtaggagt

SEQ ID NO: 2835 - DNA, 8 bp, Artificial sequence
  Synthetic
tgacagtc

SEQ ID NO: 2836 - DNA, 48 bp, Artificial sequence
  Synthetic
gcctccctcgcgccatcagtgacagtccatgctgcctcccgtaggagt

SEQ ID NO: 2837 - DNA, 8 bp, Artificial sequence
  Synthetic
tgaccaca

SEQ ID NO: 2838 - DNA, 48 bp, Artificial sequence
  Synthetic
gcctccctcgcgccatcagtgaccacacatgctgcctcccgtaggagt

SEQ ID NO: 2839 - DNA, 8 bp, Artificial sequence
  Synthetic
tgaccagt

SEQ ID NO: 2840 - DNA, 48 bp, Artificial sequence
  Synthetic
gcctccctcgcgccatcagtgaccagtcatgctgcctcccgtaggagt

SEQ ID NO: 2841 - DNA, 8 bp, Artificial sequence
  Synthetic
tgacctct

SEQ ID NO: 2842 - DNA, 48 bp, Artificial sequence
  Synthetic
gcctccctcgcgccatcagtgacctctcatgctgcctcccgtaggagt

SEQ ID NO: 2843 - DNA, 8 bp, Artificial sequence
  Synthetic
tgacctga

SEQ ID NO: 2844 - DNA, 48 bp, Artificial sequence
  Synthetic
gcctccctcgcgccatcagtgacctgacatgctgcctcccgtaggagt

SEQ ID NO: 2845 - DNA, 8 bp, Artificial sequence
  Synthetic
tgacgact

SEQ ID NO: 2846 - DNA, 48 bp, Artificial sequence
  Synthetic
gcctccctcgcgccatcagtgacgactcatgctgcctcccgtaggagt

SEQ ID NO: 2847 - DNA, 8 bp, Artificial sequence
  Synthetic
tgacgaga

SEQ ID NO: 2848 - DNA, 48 bp, Artificial sequence
  Synthetic
gcctccctcgcgccatcagtgacgagacatgctgcctcccgtaggagt

SEQ ID NO: 2849 - DNA, 8 bp, Artificial sequence
  Synthetic
tgacgtca

SEQ ID NO: 2850 - DNA, 48 bp, Artificial sequence
  Synthetic
gcctccctcgcgccatcagtgacgtcacatgctgcctcccgtaggagt

SEQ ID NO: 2851 - DNA, 8 bp, Artificial sequence
  Synthetic
tgacgtgt

SEQ ID NO: 2852 - DNA, 48 bp, Artificial sequence
  Synthetic
gcctccctcgcgccatcagtgacgtgtcatgctgcctcccgtaggagt

SEQ ID NO: 2853 - DNA, 8 bp, Artificial sequence
  Synthetic
tgactcag

SEQ ID NO: 2854 - DNA, 48 bp, Artificial sequence
  Synthetic
gcctccctcgcgccatcagtgactcagcatgctgcctcccgtaggagt

SEQ ID NO: 2855 - DNA, 8 bp, Artificial sequence
  Synthetic
tgactctc

SEQ ID NO: 2856 - DNA, 48 bp, Artificial sequence
  Synthetic
gcctccctcgcgccatcagtgactctccatgctgcctcccgtaggagt

SEQ ID NO: 2857 - DNA, 8 bp, Artificial sequence
  Synthetic
tgactgac

SEQ ID NO: 2858 - DNA, 48 bp, Artificial sequence
  Synthetic
gcctccctcgcgccatcagtgactgaccatgctgcctcccgtaggagt

SEQ ID NO: 2859 - DNA, 8 bp, Artificial sequence
  Synthetic
tgactgtg

SEQ ID NO: 2860 - DNA, 48 bp, Artificial sequence
  Synthetic
gcctccctcgcgccatcagtgactgtgcatgctgcctcccgtaggagt

SEQ ID NO: 2861 - DNA, 8 bp, Artificial sequence
  Synthetic
tgagacag

SEQ ID NO: 2862 - DNA, 48 bp, Artificial sequence
  Synthetic
gcctccctcgcgccatcagtgagacagcatgctgcctcccgtaggagt

SEQ ID NO: 2863 - DNA, 8 bp, Artificial sequence
  Synthetic
tgagactc

SEQ ID NO: 2864 - DNA, 48 bp, Artificial sequence
  Synthetic
gcctccctcgcgccatcagtgagactccatgctgcctcccgtaggagt

SEQ ID NO: 2865 - DNA, 8 bp, Artificial sequence
  Synthetic
tgagagac

SEQ ID NO: 2866 - DNA, 48 bp, Artificial sequence
  Synthetic
gcctccctcgcgccatcagtgagagaccatgctgcctcccgtaggagt

SEQ ID NO: 2867 - DNA, 8 bp, Artificial sequence
  Synthetic
tgagagtg

SEQ ID NO: 2868 - DNA, 48 bp, Artificial sequence
  Synthetic
gcctccctcgcgccatcagtgagagtgcatgctgcctcccgtaggagt

SEQ ID NO: 2869 - DNA, 8 bp, Artificial sequence
  Synthetic
tgagcact

SEQ ID NO: 2870 - DNA, 48 bp, Artificial sequence
  Synthetic
gcctccctcgcgccatcagtgagcactcatgctgcctcccgtaggagt

SEQ ID NO: 2871 - DNA, 8 bp, Artificial sequence
  Synthetic
tgagcaga

SEQ ID NO: 2872 - DNA, 48 bp, Artificial sequence
  Synthetic
gcctccctcgcgccatcagtgagcagacatgctgcctcccgtaggagt

SEQ ID NO: 2873 - DNA, 8 bp, Artificial sequence
  Synthetic
tgagctca

SEQ ID NO: 2874 - DNA, 48 bp, Artificial sequence
  Synthetic
gcctccctcgcgccatcagtgagctcacatgctgcctcccgtaggagt

SEQ ID NO: 2875 - DNA, 8 bp, Artificial sequence
  Synthetic
tgagctgt

SEQ ID NO: 2876 - DNA, 48 bp, Artificial sequence
  Synthetic
gcctccctcgcgccatcagtgagctgtcatgctgcctcccgtaggagt

SEQ ID NO: 2877 - DNA, 8 bp, Artificial sequence
  Synthetic
tgaggaca

SEQ ID NO: 2878 - DNA, 48 bp, Artificial sequence
  Synthetic
gcctccctcgcgccatcagtgaggacacatgctgcctcccgtaggagt

SEQ ID NO: 2879 - DNA, 8 bp, Artificial sequence
  Synthetic
tgaggagt

SEQ ID NO: 2880 - DNA, 48 bp, Artificial sequence
  Synthetic
gcctccctcgcgccatcagtgaggagtcatgctgcctcccgtaggagt

SEQ ID NO: 2881 - DNA, 8 bp, Artificial sequence
  Synthetic
tgaggtct

SEQ ID NO: 2882 - DNA, 48 bp, Artificial sequence
  Synthetic
gcctccctcgcgccatcagtgaggtctcatgctgcctcccgtaggagt

SEQ ID NO: 2883 - DNA, 8 bp, Artificial sequence
  Synthetic
tgaggtga

SEQ ID NO: 2884 - DNA, 48 bp, Artificial sequence
  Synthetic
gcctccctcgcgccatcagtgaggtgacatgctgcctcccgtaggagt

SEQ ID NO: 2885 - DNA, 8 bp, Artificial sequence
  Synthetic
tgagtcac

SEQ ID NO: 2886 - DNA, 48 bp, Artificial sequence
  Synthetic
gcctccctcgcgccatcagtgagtcaccatgctgcctcccgtaggagt

SEQ ID NO: 2887 - DNA, 8 bp, Artificial sequence
  Synthetic
tgagtctg

SEQ ID NO: 2888 - DNA, 48 bp, Artificial sequence
  Synthetic
gcctccctcgcgccatcagtgagtctgcatgctgcctcccgtaggagt

SEQ ID NO: 2889 - DNA, 8 bp, Artificial sequence
  Synthetic
tgagtgag

SEQ ID NO: 2890 - DNA, 48 bp, Artificial sequence
  Synthetic
gcctccctcgcgccatcagtgagtgagcatgctgcctcccgtaggagt

SEQ ID NO: 2891 - DNA, 8 bp, Artificial sequence
  Synthetic
tgagtgtc

SEQ ID NO: 2892 - DNA, 48 bp, Artificial sequence
  Synthetic
gcctccctcgcgccatcagtgagtgtccatgctgcctcccgtaggagt

SEQ ID NO: 2893 - DNA, 8 bp, Artificial sequence
  Synthetic
tgcaacca

SEQ ID NO: 2894 - DNA, 48 bp, Artificial sequence
  Synthetic
gcctccctcgcgccatcagtgcaaccacatgctgcctcccgtaggagt

SEQ ID NO: 2895 - DNA, 8 bp, Artificial sequence
  Synthetic
tgcaacgt

SEQ ID NO: 2896 - DNA, 48 bp, Artificial sequence
  Synthetic
gcctccctcgcgccatcagtgcaacgtcatgctgcctcccgtaggagt

SEQ ID NO: 2897 - DNA, 8 bp, Artificial sequence
  Synthetic
tgcaagct

SEQ ID NO: 2898 - DNA, 48 bp, Artificial sequence
  Synthetic
gcctccctcgcgccatcagtgcaagctcatgctgcctcccgtaggagt

SEQ ID NO: 2899 - DNA, 8 bp, Artificial sequence
  Synthetic
tgcaagga

SEQ ID NO: 2900 - DNA, 48 bp, Artificial sequence
  Synthetic
gcctccctcgcgccatcagtgcaaggacatgctgcctcccgtaggagt

SEQ ID NO: 2901 - DNA, 8 bp, Artificial sequence
  Synthetic
tgcacaac

SEQ ID NO: 2902 - DNA, 48 bp, Artificial sequence
  Synthetic
gcctccctcgcgccatcagtgcacaaccatgctgcctcccgtaggagt

SEQ ID NO: 2903 - DNA, 8 bp, Artificial sequence
  Synthetic
tgcacatg

SEQ ID NO: 2904 - DNA, 48 bp, Artificial sequence
  Synthetic
gcctccctcgcgccatcagtgcacatgcatgctgcctcccgtaggagt

SEQ ID NO: 2905 - DNA, 8 bp, Artificial sequence
  Synthetic
tgcactag

SEQ ID NO: 2906 - DNA, 48 bp, Artificial sequence
  Synthetic
gcctccctcgcgccatcagtgcactagcatgctgcctcccgtaggagt

SEQ ID NO: 2907 - DNA, 8 bp, Artificial sequence
  Synthetic
tgcacttc

SEQ ID NO: 2908 - DNA, 48 bp, Artificial sequence
  Synthetic
gcctccctcgcgccatcagtgcacttccatgctgcctcccgtaggagt

SEQ ID NO: 2909 - DNA, 8 bp, Artificial sequence
  Synthetic
tgcagaag

SEQ ID NO: 2910 - DNA, 48 bp, Artificial sequence
  Synthetic
gcctccctcgcgccatcagtgcagaagcatgctgcctcccgtaggagt

SEQ ID NO: 2911 - DNA, 8 bp, Artificial sequence
  Synthetic
tgcagatc

SEQ ID NO: 2912 - DNA, 48 bp, Artificial sequence
  Synthetic
gcctccctcgcgccatcagtgcagatccatgctgcctcccgtaggagt

SEQ ID NO: 2913 - DNA, 8 bp, Artificial sequence
  Synthetic
tgcagtac

SEQ ID NO: 2914 - DNA, 48 bp, Artificial sequence
  Synthetic
gcctccctcgcgccatcagtgcagtaccatgctgcctcccgtaggagt

SEQ ID NO: 2915 - DNA, 8 bp, Artificial sequence
  Synthetic
tgcagttg

SEQ ID NO: 2916 - DNA, 48 bp, Artificial sequence
  Synthetic
gcctccctcgcgccatcagtgcagttgcatgctgcctcccgtaggagt

SEQ ID NO: 2917 - DNA, 8 bp, Artificial sequence
  Synthetic
tgcatcct

SEQ ID NO: 2918 - DNA, 48 bp, Artificial sequence
  Synthetic
gcctccctcgcgccatcagtgcatcctcatgctgcctcccgtaggagt

SEQ ID NO: 2919 - DNA, 8 bp, Artificial sequence
  Synthetic
tgcatcga

SEQ ID NO: 2920 - DNA, 48 bp, Artificial sequence
  Synthetic
gcctccctcgcgccatcagtgcatcgacatgctgcctcccgtaggagt

SEQ ID NO: 2921 - DNA, 8 bp, Artificial sequence
  Synthetic
tgcatgca

SEQ ID NO: 2922 - DNA, 48 bp, Artificial sequence
  Synthetic
gcctccctcgcgccatcagtgcatgcacatgctgcctcccgtaggagt

SEQ ID NO: 2923 - DNA, 8 bp, Artificial sequence
  Synthetic
tgcatggt

SEQ ID NO: 2924 - DNA, 48 bp, Artificial sequence
  Synthetic
gcctccctcgcgccatcagtgcatggtcatgctgcctcccgtaggagt

SEQ ID NO: 2925 - DNA, 8 bp, Artificial sequence
  Synthetic
tgctacct

SEQ ID NO: 2926 - DNA, 48 bp, Artificial sequence
  Synthetic
gcctccctcgcgccatcagtgctacctcatgctgcctcccgtaggagt

SEQ ID NO: 2927 - DNA, 8 bp, Artificial sequence
  Synthetic
tgctacga

SEQ ID NO: 2928 - DNA, 48 bp, Artificial sequence
  Synthetic
gcctccctcgcgccatcagtgctacgacatgctgcctcccgtaggagt

SEQ ID NO: 2929 - DNA, 8 bp, Artificial sequence
  Synthetic
tgctagca

SEQ ID NO: 2930 - DNA, 48 bp, Artificial sequence
  Synthetic
gcctccctcgcgccatcagtgctagcacatgctgcctcccgtaggagt

SEQ ID NO: 2931 - DNA, 8 bp, Artificial sequence
  Synthetic
tgctaggt

SEQ ID NO: 2932 - DNA, 48 bp, Artificial sequence
  Synthetic
gcctccctcgcgccatcagtgctaggtcatgctgcctcccgtaggagt

SEQ ID NO: 2933 - DNA, 8 bp, Artificial sequence
  Synthetic
tgctcaag

SEQ ID NO: 2934 - DNA, 48 bp, Artificial sequence
  Synthetic
gcctccctcgcgccatcagtgctcaagcatgctgcctcccgtaggagt

SEQ ID NO: 2935 - DNA, 8 bp, Artificial sequence
  Synthetic
tgctcatc

SEQ ID NO: 2936 - DNA, 48 bp, Artificial sequence
  Synthetic
gcctccctcgcgccatcagtgctcatccatgctgcctcccgtaggagt

SEQ ID NO: 2937 - DNA, 8 bp, Artificial sequence
  Synthetic
tgctctac

SEQ ID NO: 2938 - DNA, 48 bp, Artificial sequence
  Synthetic
gcctccctcgcgccatcagtgctctaccatgctgcctcccgtaggagt

SEQ ID NO: 2939 - DNA, 8 bp, Artificial sequence
  Synthetic
tgctcttg

SEQ ID NO: 2940 - DNA, 48 bp, Artificial sequence
  Synthetic
gcctccctcgcgccatcagtgctcttgcatgctgcctcccgtaggagt

SEQ ID NO: 2941 - DNA, 8 bp, Artificial sequence
  Synthetic
tgctgaac

SEQ ID NO: 2942 - DNA, 48 bp, Artificial sequence
  Synthetic
gcctccctcgcgccatcagtgctgaaccatgctgcctcccgtaggagt

SEQ ID NO: 2943 - DNA, 8 bp, Artificial sequence
  Synthetic
tgctgatg

SEQ ID NO: 2944 - DNA, 48 bp, Artificial sequence
  Synthetic
gcctccctcgcgccatcagtgctgatgcatgctgcctcccgtaggagt

SEQ ID NO: 2945 - DNA, 8 bp, Artificial sequence
  Synthetic
tgctgtag

SEQ ID NO: 2946 - DNA, 48 bp, Artificial sequence
  Synthetic
gcctccctcgcgccatcagtgctgtagcatgctgcctcccgtaggagt

SEQ ID NO: 2947 - DNA, 8 bp, Artificial sequence
  Synthetic
tgctgttc

SEQ ID NO: 2948 - DNA, 48 bp, Artificial sequence
  Synthetic
gcctccctcgcgccatcagtgctgttccatgctgcctcccgtaggagt

SEQ ID NO: 2949 - DNA, 8 bp, Artificial sequence
  Synthetic
tgcttcca

SEQ ID NO: 2950 - DNA, 48 bp, Artificial sequence
  Synthetic
gcctccctcgcgccatcagtgcttccacatgctgcctcccgtaggagt

SEQ ID NO: 2951 - DNA, 8 bp, Artificial sequence
  Synthetic
tgcttcgt

SEQ ID NO: 2952 - DNA, 48 bp, Artificial sequence
  Synthetic
gcctccctcgcgccatcagtgcttcgtcatgctgcctcccgtaggagt

SEQ ID NO: 2953 - DNA, 8 bp, Artificial sequence
  Synthetic
tgcttgct

SEQ ID NO: 2954 - DNA, 48 bp, Artificial sequence
  Synthetic
gcctccctcgcgccatcagtgcttgctcatgctgcctcccgtaggagt

SEQ ID NO: 2955 - DNA, 8 bp, Artificial sequence
  Synthetic
tgcttgga

SEQ ID NO: 2956 - DNA, 48 bp, Artificial sequence
  Synthetic
gcctccctcgcgccatcagtgcttggacatgctgcctcccgtaggagt

SEQ ID NO: 2957 - DNA, 8 bp, Artificial sequence
  Synthetic
tggaacct

SEQ ID NO: 2958 - DNA, 48 bp, Artificial sequence
  Synthetic
gcctccctcgcgccatcagtggaacctcatgctgcctcccgtaggagt

SEQ ID NO: 2959 - DNA, 8 bp, Artificial sequence
  Synthetic
tggaacga

SEQ ID NO: 2960 - DNA, 48 bp, Artificial sequence
  Synthetic
gcctccctcgcgccatcagtggaacgacatgctgcctcccgtaggagt

SEQ ID NO: 2961 - DNA, 8 bp, Artificial sequence
  Synthetic
tggaagca

SEQ ID NO: 2962 - DNA, 48 bp, Artificial sequence
  Synthetic
gcctccctcgcgccatcagtggaagcacatgctgcctcccgtaggagt

SEQ ID NO: 2963 - DNA, 8 bp, Artificial sequence
  Synthetic
tggaaggt

SEQ ID NO: 2964 - DNA, 48 bp, Artificial sequence
  Synthetic
gcctccctcgcgccatcagtggaaggtcatgctgcctcccgtaggagt

SEQ ID NO: 2965 - DNA, 8 bp, Artificial sequence
  Synthetic
tggacaag

SEQ ID NO: 2966 - DNA, 48 bp, Artificial sequence
  Synthetic
gcctccctcgcgccatcagtggacaagcatgctgcctcccgtaggagt

SEQ ID NO: 2967 - DNA, 8 bp, Artificial sequence
  Synthetic
tggacatc

SEQ ID NO: 2968 - DNA, 48 bp, Artificial sequence
  Synthetic
gcctccctcgcgccatcagtggacatccatgctgcctcccgtaggagt

SEQ ID NO: 2969 - DNA, 8 bp, Artificial sequence
  Synthetic
tggactac

SEQ ID NO: 2970 - DNA, 48 bp, Artificial sequence
  Synthetic
gcctccctcgcgccatcagtggactaccatgctgcctcccgtaggagt

SEQ ID NO: 2971 - DNA, 8 bp, Artificial sequence
  Synthetic
tggacttg

SEQ ID NO: 2972 - DNA, 48 bp, Artificial sequence
  Synthetic
gcctccctcgcgccatcagtggacttgcatgctgcctcccgtaggagt

SEQ ID NO: 2973 - DNA, 8 bp, Artificial sequence
  Synthetic
tggagaac

SEQ ID NO: 2974 - DNA, 48 bp, Artificial sequence
  Synthetic
gcctccctcgcgccatcagtggagaaccatgctgcctcccgtaggagt

SEQ ID NO: 2975 - DNA, 8 bp, Artificial sequence
  Synthetic
tggagatg

SEQ ID NO: 2976 - DNA, 48 bp, Artificial sequence
  Synthetic
gcctccctcgcgccatcagtggagatgcatgctgcctcccgtaggagt

SEQ ID NO: 2977 - DNA, 8 bp, Artificial sequence
  Synthetic
tggagtag

SEQ ID NO: 2978 - DNA, 48 bp, Artificial sequence
  Synthetic
gcctccctcgcgccatcagtggagtagcatgctgcctcccgtaggagt

SEQ ID NO: 2979 - DNA, 8 bp, Artificial sequence
  Synthetic
tggagttc

SEQ ID NO: 2980 - DNA, 48 bp, Artificial sequence
  Synthetic
gcctccctcgcgccatcagtggagttccatgctgcctcccgtaggagt

SEQ ID NO: 2981 - DNA, 8 bp, Artificial sequence
  Synthetic
tggatcca

SEQ ID NO: 2982 - DNA, 48 bp, Artificial sequence
  Synthetic
gcctccctcgcgccatcagtggatccacatgctgcctcccgtaggagt

SEQ ID NO: 2983 - DNA, 8 bp, Artificial sequence
  Synthetic
tggatcgt

SEQ ID NO: 2984 - DNA, 48 bp, Artificial sequence
  Synthetic
gcctccctcgcgccatcagtggatcgtcatgctgcctcccgtaggagt

SEQ ID NO: 2985 - DNA, 8 bp, Artificial sequence
  Synthetic
tggatgct

SEQ ID NO: 2986 - DNA, 48 bp, Artificial sequence
  Synthetic
gcctccctcgcgccatcagtggatgctcatgctgcctcccgtaggagt

SEQ ID NO: 2987 - DNA, 8 bp, Artificial sequence
  Synthetic
tggatgga

SEQ ID NO: 2988 - DNA, 48 bp, Artificial sequence
  Synthetic
gcctccctcgcgccatcagtggatggacatgctgcctcccgtaggagt

SEQ ID NO: 2989 - DNA, 8 bp, Artificial sequence
  Synthetic
tggtacca

SEQ ID NO: 2990 - DNA, 48 bp, Artificial sequence
  Synthetic
gcctccctcgcgccatcagtggtaccacatgctgcctcccgtaggagt

SEQ ID NO: 2991 - DNA, 8 bp, Artificial sequence
  Synthetic
tggtacgt

SEQ ID NO: 2992 - DNA, 48 bp, Artificial sequence
  Synthetic
gcctccctcgcgccatcagtggtacgtcatgctgcctcccgtaggagt

SEQ ID NO: 2993 - DNA, 8 bp, Artificial sequence
  Synthetic
tggtagct

SEQ ID NO: 2994 - DNA, 48 bp, Artificial sequence
  Synthetic
gcctccctcgcgccatcagtggtagctcatgctgcctcccgtaggagt

SEQ ID NO: 2995 - DNA, 8 bp, Artificial sequence
  Synthetic
tggtagga

SEQ ID NO: 2996 - DNA, 48 bp, Artificial sequence
  Synthetic
gcctccctcgcgccatcagtggtaggacatgctgcctcccgtaggagt

SEQ ID NO: 2997 - DNA, 8 bp, Artificial sequence
  Synthetic
tggtcaac

SEQ ID NO: 2998 - DNA, 48 bp, Artificial sequence
  Synthetic
gcctccctcgcgccatcagtggtcaaccatgctgcctcccgtaggagt

SEQ ID NO: 2999 - DNA, 8 bp, Artificial sequence
  Synthetic
tggtcatg

SEQ ID NO: 3000 - DNA, 48 bp, Artificial sequence
  Synthetic
gcctccctcgcgccatcagtggtcatgcatgctgcctcccgtaggagt

SEQ ID NO: 3001 - DNA, 8 bp, Artificial sequence
  Synthetic
tggtctag

SEQ ID NO: 3002 - DNA, 48 bp, Artificial sequence
  Synthetic
gcctccctcgcgccatcagtggtctagcatgctgcctcccgtaggagt

SEQ ID NO: 3003 - DNA, 8 bp, Artificial sequence
  Synthetic
tggtcttc

SEQ ID NO: 3004 - DNA, 48 bp, Artificial sequence
  Synthetic
gcctccctcgcgccatcagtggtcttccatgctgcctcccgtaggagt

SEQ ID NO: 3005 - DNA, 8 bp, Artificial sequence
  Synthetic
tggtgaag

SEQ ID NO: 3006 - DNA, 48 bp, Artificial sequence
  Synthetic
gcctccctcgcgccatcagtggtgaagcatgctgcctcccgtaggagt

SEQ ID NO: 3007 - DNA, 8 bp, Artificial sequence
  Synthetic
tggtgatc

SEQ ID NO: 3008 - DNA, 48 bp, Artificial sequence
  Synthetic
gcctccctcgcgccatcagtggtgatccatgctgcctcccgtaggagt

SEQ ID NO: 3009 - DNA, 8 bp, Artificial sequence
  Synthetic
tggtgtac

SEQ ID NO: 3010 - DNA, 48 bp, Artificial sequence
  Synthetic
gcctccctcgcgccatcagtggtgtaccatgctgcctcccgtaggagt

SEQ ID NO: 3011 - DNA, 8 bp, Artificial sequence
  Synthetic
tggtgttg

SEQ ID NO: 3012 - DNA, 48 bp, Artificial sequence
  Synthetic
gcctccctcgcgccatcagtggtgttgcatgctgcctcccgtaggagt

SEQ ID NO: 3013 - DNA, 8 bp, Artificial sequence
  Synthetic
tggttcct

SEQ ID NO: 3014 - DNA, 48 bp, Artificial sequence
  Synthetic
gcctccctcgcgccatcagtggttcctcatgctgcctcccgtaggagt

SEQ ID NO: 3015 - DNA, 8 bp, Artificial sequence
  Synthetic
tggttcga

SEQ ID NO: 3016 - DNA, 48 bp, Artificial sequence
  Synthetic
gcctccctcgcgccatcagtggttcgacatgctgcctcccgtaggagt

SEQ ID NO: 3017 - DNA, 8 bp, Artificial sequence
  Synthetic
tggttgca

SEQ ID NO: 3018 - DNA, 48 bp, Artificial sequence
  Synthetic
gcctccctcgcgccatcagtggttgcacatgctgcctcccgtaggagt

SEQ ID NO: 3019 - DNA, 8 bp, Artificial sequence
  Synthetic
tggttggt

SEQ ID NO: 3020 - DNA, 48 bp, Artificial sequence
  Synthetic
gcctccctcgcgccatcagtggttggtcatgctgcctcccgtaggagt

SEQ ID NO: 3021 - DNA, 8 bp, Artificial sequence
  Synthetic
tgtcacag

SEQ ID NO: 3022 - DNA, 48 bp, Artificial sequence
  Synthetic
gcctccctcgcgccatcagtgtcacagcatgctgcctcccgtaggagt

SEQ ID NO: 3023 - DNA, 8 bp, Artificial sequence
  Synthetic
tgtcactc

SEQ ID NO: 3024 - DNA, 48 bp, Artificial sequence
  Synthetic
gcctccctcgcgccatcagtgtcactccatgctgcctcccgtaggagt

SEQ ID NO: 3025 - DNA, 8 bp, Artificial sequence
  Synthetic
tgtcagac

SEQ ID NO: 3026 - DNA, 48 bp, Artificial sequence
  Synthetic
gcctccctcgcgccatcagtgtcagaccatgctgcctcccgtaggagt

SEQ ID NO: 3027 - DNA, 8 bp, Artificial sequence
  Synthetic
tgtcagtg

SEQ ID NO: 3028 - DNA, 48 bp, Artificial sequence
  Synthetic
gcctccctcgcgccatcagtgtcagtgcatgctgcctcccgtaggagt

SEQ ID NO: 3029 - DNA, 8 bp, Artificial sequence
  Synthetic
tgtccact

SEQ ID NO: 3030 - DNA, 48 bp, Artificial sequence
  Synthetic
gcctccctcgcgccatcagtgtccactcatgctgcctcccgtaggagt

SEQ ID NO: 3031 - DNA, 8 bp, Artificial sequence
  Synthetic
tgtccaga

SEQ ID NO: 3032 - DNA, 48 bp, Artificial sequence
  Synthetic
gcctccctcgcgccatcagtgtccagacatgctgcctcccgtaggagt

SEQ ID NO: 3033 - DNA, 8 bp, Artificial sequence
  Synthetic
tgtcctca

SEQ ID NO: 3034 - DNA, 48 bp, Artificial sequence
  Synthetic
gcctccctcgcgccatcagtgtcctcacatgctgcctcccgtaggagt

SEQ ID NO: 3035 - DNA, 8 bp, Artificial sequence
  Synthetic
tgtcctgt

SEQ ID NO: 3036 - DNA, 48 bp, Artificial sequence
  Synthetic
gcctccctcgcgccatcagtgtcctgtcatgctgcctcccgtaggagt

SEQ ID NO: 3037 - DNA, 8 bp, Artificial sequence
  Synthetic
tgtcgaca

SEQ ID NO: 3038 - DNA, 48 bp, Artificial sequence
  Synthetic
gcctccctcgcgccatcagtgtcgacacatgctgcctcccgtaggagt

SEQ ID NO: 3039 - DNA, 8 bp, Artificial sequence
  Synthetic
tgtcgagt

SEQ ID NO: 3040 - DNA, 48 bp, Artificial sequence
  Synthetic
gcctccctcgcgccatcagtgtcgagtcatgctgcctcccgtaggagt

SEQ ID NO: 3041 - DNA, 8 bp, Artificial sequence
  Synthetic
tgtcgtct

SEQ ID NO: 3042 - DNA, 48 bp, Artificial sequence
  Synthetic
gcctccctcgcgccatcagtgtcgtctcatgctgcctcccgtaggagt

SEQ ID NO: 3043 - DNA, 8 bp, Artificial sequence
  Synthetic
tgtcgtga

SEQ ID NO: 3044 - DNA, 48 bp, Artificial sequence
  Synthetic
gcctccctcgcgccatcagtgtcgtgacatgctgcctcccgtaggagt

SEQ ID NO: 3045 - DNA, 8 bp, Artificial sequence
  Synthetic
tgtctcac

SEQ ID NO: 3046 - DNA, 48 bp, Artificial sequence
  Synthetic
gcctccctcgcgccatcagtgtctcaccatgctgcctcccgtaggagt

SEQ ID NO: 3047 - DNA, 8 bp, Artificial sequence
  Synthetic
tgtctctg

SEQ ID NO: 3048 - DNA, 48 bp, Artificial sequence
  Synthetic
gcctccctcgcgccatcagtgtctctgcatgctgcctcccgtaggagt

SEQ ID NO: 3049 - DNA, 8 bp, Artificial sequence
  Synthetic
tgtctgag

SEQ ID NO: 3050 - DNA, 48 bp, Artificial sequence
  Synthetic
gcctccctcgcgccatcagtgtctgagcatgctgcctcccgtaggagt

SEQ ID NO: 3051 - DNA, 8 bp, Artificial sequence
  Synthetic
tgtctgtc

SEQ ID NO: 3052 - DNA, 48 bp, Artificial sequence
  Synthetic
gcctccctcgcgccatcagtgtctgtccatgctgcctcccgtaggagt

SEQ ID NO: 3053 - DNA, 8 bp, Artificial sequence
  Synthetic
tgtgacac

SEQ ID NO: 3054 - DNA, 48 bp, Artificial sequence
  Synthetic
gcctccctcgcgccatcagtgtgacaccatgctgcctcccgtaggagt

SEQ ID NO: 3055 - DNA, 8 bp, Artificial sequence
  Synthetic
tgtgactg

SEQ ID NO: 3056 - DNA, 48 bp, Artificial sequence
  Synthetic
gcctccctcgcgccatcagtgtgactgcatgctgcctcccgtaggagt

SEQ ID NO: 3057 - DNA, 8 bp, Artificial sequence
  Synthetic
tgtgagag

SEQ ID NO: 3058 - DNA, 48 bp, Artificial sequence
  Synthetic
gcctccctcgcgccatcagtgtgagagcatgctgcctcccgtaggagt

SEQ ID NO: 3059 - DNA, 8 bp, Artificial sequence
  Synthetic
tgtgagtc

SEQ ID NO: 3060 - DNA, 48 bp, Artificial sequence
  Synthetic
gcctccctcgcgccatcagtgtgagtccatgctgcctcccgtaggagt

SEQ ID NO: 3061 - DNA, 8 bp, Artificial sequence
  Synthetic
tgtgcaca

SEQ ID NO: 3062 - DNA, 48 bp, Artificial sequence
  Synthetic
gcctccctcgcgccatcagtgtgcacacatgctgcctcccgtaggagt

SEQ ID NO: 3063 - DNA, 8 bp, Artificial sequence
  Synthetic
tgtgcagt

SEQ ID NO: 3064 - DNA, 48 bp, Artificial sequence
  Synthetic
gcctccctcgcgccatcagtgtgcagtcatgctgcctcccgtaggagt

SEQ ID NO: 3065 - DNA, 8 bp, Artificial sequence
  Synthetic
tgtgctct

SEQ ID NO: 3066 - DNA, 48 bp, Artificial sequence
  Synthetic
gcctccctcgcgccatcagtgtgctctcatgctgcctcccgtaggagt

SEQ ID NO: 3067 - DNA, 8 bp, Artificial sequence
  Synthetic
tgtgctga

SEQ ID NO: 3068 - DNA, 48 bp, Artificial sequence
  Synthetic
gcctccctcgcgccatcagtgtgctgacatgctgcctcccgtaggagt

SEQ ID NO: 3069 - DNA, 8 bp, Artificial sequence
  Synthetic
tgtggact

SEQ ID NO: 3070 - DNA, 48 bp, Artificial sequence
  Synthetic
gcctccctcgcgccatcagtgtggactcatgctgcctcccgtaggagt

SEQ ID NO: 3071 - DNA, 8 bp, Artificial sequence
  Synthetic
tgtggaga

SEQ ID NO: 3072 - DNA, 48 bp, Artificial sequence
  Synthetic
gcctccctcgcgccatcagtgtggagacatgctgcctcccgtaggagt

SEQ ID NO: 3073 - DNA, 8 bp, Artificial sequence
  Synthetic
tgtggtca

SEQ ID NO: 3074 - DNA, 48 bp, Artificial sequence
  Synthetic
gcctccctcgcgccatcagtgtggtcacatgctgcctcccgtaggagt

SEQ ID NO: 3075 - DNA, 8 bp, Artificial sequence
  Synthetic
tgtggtgt

SEQ ID NO: 3076 - DNA, 48 bp, Artificial sequence
  Synthetic
gcctccctcgcgccatcagtgtggtgtcatgctgcctcccgtaggagt

SEQ ID NO: 3077 - DNA, 8 bp, Artificial sequence
  Synthetic
tgtgtcag

SEQ ID NO: 3078 - DNA, 48 bp, Artificial sequence
  Synthetic
gcctccctcgcgccatcagtgtgtcagcatgctgcctcccgtaggagt

SEQ ID NO: 3079 - DNA, 8 bp, Artificial sequence
  Synthetic
tgtgtctc

SEQ ID NO: 3080 - DNA, 48 bp, Artificial sequence
  Synthetic
gcctccctcgcgccatcagtgtgtctccatgctgcctcccgtaggagt

SEQ ID NO: 3081 - DNA, 8 bp, Artificial sequence
  Synthetic
tgtgtgac

SEQ ID NO: 3082 - DNA, 48 bp, Artificial sequence
  Synthetic
gcctccctcgcgccatcagtgtgtgaccatgctgcctcccgtaggagt

SEQ ID NO: 3083 - DNA, 8 bp, Artificial sequence
  Synthetic
tgtgtgtg

SEQ ID NO: 3084 - DNA, 48 bp, Artificial sequence
  Synthetic
gcctccctcgcgccatcagtgtgtgtgcatgctgcctcccgtaggagt

SEQ ID NO: 3085 - DNA, 8 bp, Artificial sequence
  Synthetic
ttaaccgg

SEQ ID NO: 3086 - DNA, 48 bp, Artificial sequence
  Synthetic
gcctccctcgcgccatcagttaaccggcatgctgcctcccgtaggagt

SEQ ID NO: 3087 - DNA, 8 bp, Artificial sequence
  Synthetic
ttaacgcg

SEQ ID NO: 3088 - DNA, 48 bp, Artificial sequence
  Synthetic
gcctccctcgcgccatcagttaacgcgcatgctgcctcccgtaggagt

SEQ ID NO: 3089 - DNA, 8 bp, Artificial sequence
  Synthetic
ttaacggc

SEQ ID NO: 3090 - DNA, 48 bp, Artificial sequence
  Synthetic
gcctccctcgcgccatcagttaacggccatgctgcctcccgtaggagt

SEQ ID NO: 3091 - DNA, 8 bp, Artificial sequence
  Synthetic
ttaagccg

SEQ ID NO: 3092 - DNA, 48 bp, Artificial sequence
  Synthetic
gcctccctcgcgccatcagttaagccgcatgctgcctcccgtaggagt

SEQ ID NO: 3093 - DNA, 8 bp, Artificial sequence
  Synthetic
ttaagcgc

SEQ ID NO: 3094 - DNA, 48 bp, Artificial sequence
  Synthetic
gcctccctcgcgccatcagttaagcgccatgctgcctcccgtaggagt

SEQ ID NO: 3095 - DNA, 8 bp, Artificial sequence
  Synthetic
ttaaggcc

SEQ ID NO: 3096 - DNA, 48 bp, Artificial sequence
  Synthetic
gcctccctcgcgccatcagttaaggcccatgctgcctcccgtaggagt

SEQ ID NO: 3097 - DNA, 8 bp, Artificial sequence
  Synthetic
ttatccgc

SEQ ID NO: 3098 - DNA, 48 bp, Artificial sequence
  Synthetic
gcctccctcgcgccatcagttatccgccatgctgcctcccgtaggagt

SEQ ID NO: 3099 - DNA, 8 bp, Artificial sequence
  Synthetic
ttatcgcc

SEQ ID NO: 3100 - DNA, 48 bp, Artificial sequence
  Synthetic
gcctccctcgcgccatcagttatcgcccatgctgcctcccgtaggagt

SEQ ID NO: 3101 - DNA, 8 bp, Artificial sequence
  Synthetic
ttatgcgg

SEQ ID NO: 3102 - DNA, 48 bp, Artificial sequence
  Synthetic
gcctccctcgcgccatcagttatgcggcatgctgcctcccgtaggagt

SEQ ID NO: 3103 - DNA, 8 bp, Artificial sequence
  Synthetic
ttatggcg

SEQ ID NO: 3104 - DNA, 48 bp, Artificial sequence
  Synthetic
gcctccctcgcgccatcagttatggcgcatgctgcctcccgtaggagt

SEQ ID NO: 3105 - DNA, 8 bp, Artificial sequence
  Synthetic
ttccaacc

SEQ ID NO: 3106 - DNA, 48 bp, Artificial sequence
  Synthetic
gcctccctcgcgccatcagttccaacccatgctgcctcccgtaggagt

SEQ ID NO: 3107 - DNA, 8 bp, Artificial sequence
  Synthetic
ttccaagg

SEQ ID NO: 3108 - DNA, 48 bp, Artificial sequence
  Synthetic
gcctccctcgcgccatcagttccaaggcatgctgcctcccgtaggagt

SEQ ID NO: 3109 - DNA, 8 bp, Artificial sequence
  Synthetic
ttccatcg

SEQ ID NO: 3110 - DNA, 48 bp, Artificial sequence
  Synthetic
gcctccctcgcgccatcagttccatcgcatgctgcctcccgtaggagt

SEQ ID NO: 3111 - DNA, 8 bp, Artificial sequence
  Synthetic
ttccatgc

SEQ ID NO: 3112 - DNA, 48 bp, Artificial sequence
  Synthetic
gcctccctcgcgccatcagttccatgccatgctgcctcccgtaggagt

SEQ ID NO: 3113 - DNA, 8 bp, Artificial sequence
  Synthetic
ttccgcat

SEQ ID NO: 3114 - DNA, 48 bp, Artificial sequence
  Synthetic
gcctccctcgcgccatcagttccgcatcatgctgcctcccgtaggagt

SEQ ID NO: 3115 - DNA, 8 bp, Artificial sequence
  Synthetic
ttccgcta

SEQ ID NO: 3116 - DNA, 48 bp, Artificial sequence
  Synthetic
gcctccctcgcgccatcagttccgctacatgctgcctcccgtaggagt

SEQ ID NO: 3117 - DNA, 8 bp, Artificial sequence
  Synthetic
ttccggaa

SEQ ID NO: 3118 - DNA, 48 bp, Artificial sequence
  Synthetic
gcctccctcgcgccatcagttccggaacatgctgcctcccgtaggagt

SEQ ID NO: 3119 - DNA, 8 bp, Artificial sequence
  Synthetic
ttccggtt

SEQ ID NO: 3120 - DNA, 48 bp, Artificial sequence
  Synthetic
gcctccctcgcgccatcagttccggttcatgctgcctcccgtaggagt

SEQ ID NO: 3121 - DNA, 8 bp, Artificial sequence
  Synthetic
ttcctacg

SEQ ID NO: 3122 - DNA, 48 bp, Artificial sequence
  Synthetic
gcctccctcgcgccatcagttcctacgcatgctgcctcccgtaggagt

SEQ ID NO: 3123 - DNA, 8 bp, Artificial sequence
  Synthetic
ttcctagc

SEQ ID NO: 3124 - DNA, 48 bp, Artificial sequence
  Synthetic
gcctccctcgcgccatcagttcctagccatgctgcctcccgtaggagt

SEQ ID NO: 3125 - DNA, 8 bp, Artificial sequence
  Synthetic
ttccttcc

SEQ ID NO: 3126 - DNA, 48 bp, Artificial sequence
  Synthetic
gcctccctcgcgccatcagttccttcccatgctgcctcccgtaggagt

SEQ ID NO: 3127 - DNA, 8 bp, Artificial sequence
  Synthetic
ttccttgg

SEQ ID NO: 3128 - DNA, 48 bp, Artificial sequence
  Synthetic
gcctccctcgcgccatcagttccttggcatgctgcctcccgtaggagt

SEQ ID NO: 3129 - DNA, 8 bp, Artificial sequence
  Synthetic
ttcgaacg

SEQ ID NO: 3130 - DNA, 48 bp, Artificial sequence
  Synthetic
gcctccctcgcgccatcagttcgaacgcatgctgcctcccgtaggagt

SEQ ID NO: 3131 - DNA, 8 bp, Artificial sequence
  Synthetic
ttcgaagc

SEQ ID NO: 3132 - DNA, 48 bp, Artificial sequence
  Synthetic
gcctccctcgcgccatcagttcgaagccatgctgcctcccgtaggagt

SEQ ID NO: 3133 - DNA, 8 bp, Artificial sequence
  Synthetic
ttcgatcc

SEQ ID NO: 3134 - DNA, 48 bp, Artificial sequence
  Synthetic
gcctccctcgcgccatcagttcgatcccatgctgcctcccgtaggagt

SEQ ID NO: 3135 - DNA, 8 bp, Artificial sequence
  Synthetic
ttcgatgg

SEQ ID NO: 3136 - DNA, 48 bp, Artificial sequence
  Synthetic
gcctccctcgcgccatcagttcgatggcatgctgcctcccgtaggagt

SEQ ID NO: 3137 - DNA, 8 bp, Artificial sequence
  Synthetic
ttcgccat

SEQ ID NO: 3138 - DNA, 48 bp, Artificial sequence
  Synthetic
gcctccctcgcgccatcagttcgccatcatgctgcctcccgtaggagt

SEQ ID NO: 3139 - DNA, 8 bp, Artificial sequence
  Synthetic
ttcgccta

SEQ ID NO: 3140 - DNA, 48 bp, Artificial sequence
  Synthetic
gcctccctcgcgccatcagttcgcctacatgctgcctcccgtaggagt

SEQ ID NO: 3141 - DNA, 8 bp, Artificial sequence
  Synthetic
ttcgcgaa

SEQ ID NO: 3142 - DNA, 48 bp, Artificial sequence
  Synthetic
gcctccctcgcgccatcagttcgcgaacatgctgcctcccgtaggagt

SEQ ID NO: 3143 - DNA, 8 bp, Artificial sequence
  Synthetic
ttcgcgtt

SEQ ID NO: 3144 - DNA, 48 bp, Artificial sequence
  Synthetic
gcctccctcgcgccatcagttcgcgttcatgctgcctcccgtaggagt

SEQ ID NO: 3145 - DNA, 8 bp, Artificial sequence
  Synthetic
ttcggcaa

SEQ ID NO: 3146 - DNA, 48 bp, Artificial sequence
  Synthetic
gcctccctcgcgccatcagttcggcaacatgctgcctcccgtaggagt

SEQ ID NO: 3147 - DNA, 8 bp, Artificial sequence
  Synthetic
ttcggctt

SEQ ID NO: 3148 - DNA, 48 bp, Artificial sequence
  Synthetic
gcctccctcgcgccatcagttcggcttcatgctgcctcccgtaggagt

SEQ ID NO: 3149 - DNA, 8 bp, Artificial sequence
  Synthetic
ttgcaagc

SEQ ID NO: 3150 - DNA, 48 bp, Artificial sequence
  Synthetic
gcctccctcgcgccatcagttgcaagccatgctgcctcccgtaggagt

SEQ ID NO: 3151 - DNA, 8 bp, Artificial sequence
  Synthetic
ttgcatcc

SEQ ID NO: 3152 - DNA, 48 bp, Artificial sequence
  Synthetic
gcctccctcgcgccatcagttgcatcccatgctgcctcccgtaggagt

SEQ ID NO: 3153 - DNA, 8 bp, Artificial sequence
  Synthetic
ttgcatgg

SEQ ID NO: 3154 - DNA, 48 bp, Artificial sequence
  Synthetic
gcctccctcgcgccatcagttgcatggcatgctgcctcccgtaggagt

SEQ ID NO: 3155 - DNA, 8 bp, Artificial sequence
  Synthetic
ttgccgaa

SEQ ID NO: 3156 - DNA, 48 bp, Artificial sequence
  Synthetic
gcctccctcgcgccatcagttgccgaacatgctgcctcccgtaggagt

SEQ ID NO: 3157 - DNA, 8 bp, Artificial sequence
  Synthetic
ttgccgtt

SEQ ID NO: 3158 - DNA, 48 bp, Artificial sequence
  Synthetic
gcctccctcgcgccatcagttgccgttcatgctgcctcccgtaggagt

SEQ ID NO: 3159 - DNA, 8 bp, Artificial sequence
  Synthetic
ttgcgcaa

SEQ ID NO: 3160 - DNA, 48 bp, Artificial sequence
  Synthetic
gcctccctcgcgccatcagttgcgcaacatgctgcctcccgtaggagt

SEQ ID NO: 3161 - DNA, 8 bp, Artificial sequence
  Synthetic
ttgcgctt

SEQ ID NO: 3162 - DNA, 48 bp, Artificial sequence
  Synthetic
gcctccctcgcgccatcagttgcgcttcatgctgcctcccgtaggagt

SEQ ID NO: 3163 - DNA, 8 bp, Artificial sequence
  Synthetic
ttgcggat

SEQ ID NO: 3164 - DNA, 48 bp, Artificial sequence
  Synthetic
gcctccctcgcgccatcagttgcggatcatgctgcctcccgtaggagt

SEQ ID NO: 3165 - DNA, 8 bp, Artificial sequence
  Synthetic
ttgcggta

SEQ ID NO: 3166 - DNA, 48 bp, Artificial sequence
  Synthetic
gcctccctcgcgccatcagttgcggtacatgctgcctcccgtaggagt

SEQ ID NO: 3167 - DNA, 8 bp, Artificial sequence
  Synthetic
ttgctacc

SEQ ID NO: 3168 - DNA, 48 bp, Artificial sequence
  Synthetic
gcctccctcgcgccatcagttgctacccatgctgcctcccgtaggagt

SEQ ID NO: 3169 - DNA, 8 bp, Artificial sequence
  Synthetic
ttgctagg

SEQ ID NO: 3170 - DNA, 48 bp, Artificial sequence
  Synthetic
gcctccctcgcgccatcagttgctaggcatgctgcctcccgtaggagt

SEQ ID NO: 3171 - DNA, 8 bp, Artificial sequence
  Synthetic
ttgcttcg

SEQ ID NO: 3172 - DNA, 48 bp, Artificial sequence
  Synthetic
gcctccctcgcgccatcagttgcttcgcatgctgcctcccgtaggagt

SEQ ID NO: 3173 - DNA, 8 bp, Artificial sequence
  Synthetic
ttgcttgc

SEQ ID NO: 3174 - DNA, 48 bp, Artificial sequence
  Synthetic
gcctccctcgcgccatcagttgcttgccatgctgcctcccgtaggagt

SEQ ID NO: 3175 - DNA, 8 bp, Artificial sequence
  Synthetic
ttggaacc

SEQ ID NO: 3176 - DNA, 48 bp, Artificial sequence
  Synthetic
gcctccctcgcgccatcagttggaacccatgctgcctcccgtaggagt

SEQ ID NO: 3177 - DNA, 8 bp, Artificial sequence
  Synthetic
ttggaagg

SEQ ID NO: 3178 - DNA, 48 bp, Artificial sequence
  Synthetic
gcctccctcgcgccatcagttggaaggcatgctgcctcccgtaggagt

SEQ ID NO: 3179 - DNA, 8 bp, Artificial sequence
  Synthetic
ttggatcg

SEQ ID NO: 3180 - DNA, 48 bp, Artificial sequence
  Synthetic
gcctccctcgcgccatcagttggatcgcatgctgcctcccgtaggagt

SEQ ID NO: 3181 - DNA, 8 bp, Artificial sequence
  Synthetic
ttggatgc

SEQ ID NO: 3182 - DNA, 48 bp, Artificial sequence
  Synthetic
gcctccctcgcgccatcagttggatgccatgctgcctcccgtaggagt

SEQ ID NO: 3183 - DNA, 8 bp, Artificial sequence
  Synthetic
ttggccaa

SEQ ID NO: 3184 - DNA, 48 bp, Artificial sequence
  Synthetic
gcctccctcgcgccatcagttggccaacatgctgcctcccgtaggagt

SEQ ID NO: 3185 - DNA, 8 bp, Artificial sequence
  Synthetic
ttggcctt

SEQ ID NO: 3186 - DNA, 48 bp, Artificial sequence
  Synthetic
gcctccctcgcgccatcagttggccttcatgctgcctcccgtaggagt

SEQ ID NO: 3187 - DNA, 8 bp, Artificial sequence
  Synthetic
ttggcgat

SEQ ID NO: 3188 - DNA, 48 bp, Artificial sequence
  Synthetic
gcctccctcgcgccatcagttggcgatcatgctgcctcccgtaggagt

SEQ ID NO: 3189 - DNA, 8 bp, Artificial sequence
  Synthetic
ttggcgta

SEQ ID NO: 3190 - DNA, 48 bp, Artificial sequence
  Synthetic
gcctccctcgcgccatcagttggcgtacatgctgcctcccgtaggagt

SEQ ID NO: 3191 - DNA, 8 bp, Artificial sequence
  Synthetic
ttggtacg

SEQ ID NO: 3192 - DNA, 48 bp, Artificial sequence
  Synthetic
gcctccctcgcgccatcagttggtacgcatgctgcctcccgtaggagt

SEQ ID NO: 3193 - DNA, 8 bp, Artificial sequence
  Synthetic
ttggtagc

SEQ ID NO: 3194 - DNA, 48 bp, Artificial sequence
  Synthetic
gcctccctcgcgccatcagttggtagccatgctgcctcccgtaggagt

SEQ ID NO: 3195 - DNA, 8 bp, Artificial sequence
  Synthetic
ttggttcc

SEQ ID NO: 3196 - DNA, 48 bp, Artificial sequence
  Synthetic
gcctccctcgcgccatcagttggttcccatgctgcctcccgtaggagt

SEQ ID NO: 3197 - DNA, 8 bp, Artificial sequence
  Synthetic
ttggttgg

SEQ ID NO: 3198 - DNA, 48 bp, Artificial sequence
  Synthetic
gcctccctcgcgccatcagttggttggcatgctgcctcccgtaggagt

SEQ ID NO: 3199 - DNA, 41 bp, Artificial sequence
  Synthetic
gccttgccagcccgctcagtcagagtttgatcctggctcag

SEQ ID NO: 3200 - DNA, 48 bp, Artificial sequence
  Synthetic
  misc_feature (20)..(27): n is a, c, g, or t
gcctccctcgcgccatcagnnnnnnnncatgctgcctcccgtaggagt

SEQ ID NO: 3201 - DNA, 8 bp, Artificial sequence
  Synthetic
ttcgtacc

SEQ ID NO: 3202 - DNA, 48 bp, Artificial sequence
  Synthetic
gcctccctcgcgccatcagttcgtacccatgctgcctcccgtaggagt

SEQ ID NO: 3203 - DNA, 8 bp, Artificial sequence
  Synthetic
ttcgtagg

SEQ ID NO: 3204 - DNA, 48 bp, Artificial sequence
  Synthetic
gcctccctcgcgccatcagttcgtaggcatgctgcctcccgtaggagt

SEQ ID NO: 3205 - DNA, 8 bp, Artificial sequence
  Synthetic
ttcgttcg

SEQ ID NO: 3206 - DNA, 48 bp, Artificial sequence
  Synthetic
gcctccctcgcgccatcagttcgttcgcatgctgcctcccgtaggagt

SEQ ID NO: 3207 - DNA, 8 bp, Artificial sequence
  Synthetic
ttcgttgc

SEQ ID NO: 3208 - DNA, 48 bp, Artificial sequence
  Synthetic
gcctccctcgcgccatcagttcgttgccatgctgcctcccgtaggagt

SEQ ID NO: 3209 - DNA, 8 bp, Artificial sequence
  Synthetic
ttgcaacg

SEQ ID NO: 3210 - DNA, 48 bp, Artificial sequence
  Synthetic
gcctccctcgcgccatcagttgcaacgcatgctgcctcccgtaggagt

SEQ ID NO: 3211 - DNA, 8 bp, Artificial sequence
  Synthetic
acccatgc

SEQ ID NO: 3212 - DNA, 8 bp, Artificial sequence
  Synthetic
tcgtagcc

SEQ ID NO: 3213 - DNA, 8 bp, Artificial sequence
  Synthetic
acacatct

SEQ ID NO: 3214 - DNA, 8 bp, Artificial sequence
  Synthetic
tttcctag

SEQ ID NO: 3215 - DNA, 8 bp, Artificial sequence
  Synthetic
aaccacgc

SEQ ID NO: 3216 - DNA, 8 bp, Artificial sequence
  Synthetic
tagtagca

SEQ ID NO: 3217 - DNA, 8 bp, Artificial sequence
  Synthetic
cgtcctag

SEQ ID NO: 3218 - DNA, 8 bp, Artificial sequence
  Synthetic
gttagctt

SEQ ID NO: 3219 - DNA, 8 bp, Artificial sequence
  Synthetic
agccatgc

SEQ ID NO: 3220 - DNA, 8 bp, Artificial sequence
  Synthetic
gcgtagca

SEQ ID NO: 3221 - DNA, 8 bp, Artificial sequence
  Synthetic
attcctag

SEQ ID NO: 3222 - DNA, 8 bp, Artificial sequence
  Synthetic
ggtagatt

SEQ ID NO: 3223 - DNA, 8 bp, Artificial sequence
  Synthetic
taccatgc

SEQ ID NO: 3224 - DNA, 8 bp, Artificial sequence
  Synthetic
tcctagca

SEQ ID NO: 3225 - DNA, 8 bp, Artificial sequence
  Synthetic
acagctct

SEQ ID NO: 3226 - DNA, 8 bp, Artificial sequence
  Synthetic
cttcgtag

SEQ ID NO: 3227 - DNA, 8 bp, Artificial sequence
  Synthetic
gctagctt

SEQ ID NO: 3228 - DNA, 25 bp, Artificial sequence
  Synthetic
ttttttttttttttttttttttttt

SEQ ID NO: 3229 - DNA, 25 bp, Artificial sequence
  Synthetic
aaaaaaaaaaaaaaaaaaaaaaaaa

SEQ ID NO: 3230 - DNA, 33 bp, Artificial sequence
  Synthetic
aaccatgcttttttttttttttttttttttttt

SEQ ID NO: 3231 - DNA, 33 bp, Artificial sequence
  Synthetic
tcgtagcattttttttttttttttttttttttt

SEQ ID NO: 3232 - DNA, 33 bp, Artificial sequence
  Synthetic
acacctctttttttttttttttttttttttttt

SEQ ID NO: 3233 - DNA, 33 bp, Artificial sequence
  Synthetic
cttcctagttttttttttttttttttttttttt

SEQ ID NO: 3234 - DNA, 33 bp, Artificial sequence
  Synthetic
ggtagcttttttttttttttttttttttttttt

SEQ ID NO: 3235 - DNA, 33 bp, Artificial sequence
  Synthetic
acccatgcaaaaaaaaaaaaaaaaaaaaaaaaa

SEQ ID NO: 3236 - DNA, 33 bp, Artificial sequence
  Synthetic
tcgtagccaaaaaaaaaaaaaaaaaaaaaaaaa

SEQ ID NO: 3237 - DNA, 33 bp, Artificial sequence
  Synthetic
acacatctaaaaaaaaaaaaaaaaaaaaaaaaa

SEQ ID NO: 3238 - DNA, 33 bp, Artificial sequence
  Synthetic
tttcctagaaaaaaaaaaaaaaaaaaaaaaaaa

SEQ ID NO: 3239 - DNA, 33 bp, Artificial sequence
  Synthetic
ggtagcttaaaaaaaaaaaaaaaaaaaaaaaaa

SEQ ID NO: 3240 - DNA, 33 bp, Artificial sequence
  Synthetic
aaccacgcaaaaaaaaaaaaaaaaaaaaaaaaa

SEQ ID NO: 3241 - DNA, 33 bp, Artificial sequence
  Synthetic
tagtagcaaaaaaaaaaaaaaaaaaaaaaaaaa

SEQ ID NO: 3242 - DNA, 33 bp, Artificial sequence
  Synthetic
acacctctaaaaaaaaaaaaaaaaaaaaaaaaa

SEQ ID NO: 3243 - DNA, 33 bp, Artificial sequence
  Synthetic
cgtcctagaaaaaaaaaaaaaaaaaaaaaaaaa

SEQ ID NO: 3244 - DNA, 33 bp, Artificial sequence
  Synthetic
gttagcttaaaaaaaaaaaaaaaaaaaaaaaaa

SEQ ID NO: 3245 - DNA, 33 bp, Artificial sequence
  Synthetic
agccatgcaaaaaaaaaaaaaaaaaaaaaaaaa

SEQ ID NO: 3246 - DNA, 33 bp, Artificial sequence
  Synthetic
gcgtagcaaaaaaaaaaaaaaaaaaaaaaaaaa

SEQ ID NO: 3247 - DNA, 33 bp, Artificial sequence; identical to SEQ ID NO: 3242
  Synthetic

SEQ ID NO: 3248 - DNA, 33 bp, Artificial sequence
  Synthetic
attcctagaaaaaaaaaaaaaaaaaaaaaaaaa

SEQ ID NO: 3249 - DNA, 33 bp, Artificial sequence
  Synthetic
ggtagattaaaaaaaaaaaaaaaaaaaaaaaaa

SEQ ID NO: 3250 - DNA, 33 bp, Artificial sequence
  Synthetic
taccatgcccccccccccccccccccccccccc

SEQ ID NO: 3251 - DNA, 33 bp, Artificial sequence
  Synthetic
tcctagcaccccccccccccccccccccccccc

SEQ ID NO: 3252 - DNA, 33 bp, Artificial sequence
  Synthetic
acagctctccccccccccccccccccccccccc

SEQ ID NO: 3253 - DNA, 33 bp, Artificial sequence
  Synthetic
cttcgtagccccccccccccccccccccccccc

SEQ ID NO: 3254 - DNA, 33 bp, Artificial sequence
  Synthetic
gctagcttccccccccccccccccccccccccc

SEQ ID NO: 3255 - DNA, 8 bp, Artificial sequence
  Synthetic
aaccgtgc

SEQ ID NO: 3256 - DNA, 8 bp, Artificial sequence
  Synthetic
aaacatgc

SEQ ID NO: 3257 - DNA, 8 bp, Artificial sequence
  Synthetic
aaccatgt

SEQ ID NO: 3258 - DNA, 8 bp, Artificial sequence
  Synthetic
aaccacgc

SEQ ID NO: 3259 - DNA, 8 bp, Artificial sequence
  Synthetic
aaccaggc

SEQ ID NO: 3260 - DNA, 8 bp, Artificial sequence
  Synthetic
aaccattc

SEQ ID NO: 3261 - DNA, 8 bp, Artificial sequence
  Synthetic
atccatgc

SEQ ID NO: 3262 - DNA, 8 bp, Artificial sequence
  Synthetic
aaccaagc

SEQ ID NO: 3263 - DNA, 8 bp, Artificial sequence
  Synthetic
aacgatgc

SEQ ID NO: 3264 - DNA, 8 bp, Artificial sequence
  Synthetic
aaccatcc
